(19) United States
(12) Patent Application Publication
(10) Pub. No.: US 2025/0257351 A1
(43) Pub. Date: Aug. 14, 2025

(54) REVERSIR TM COMPOUNDS

(71) Applicant: ALNYLAM PHARMACEUTICALS, INC., Cambridge, MA (US)

(72) Inventors: Vasant JADHAV, Cambridge, MA (US); John MARAGANORE, Cambridge, MA (US); Martin MAIER, Cambridge, MA (US); Kallanthottathil G. RAJEEV, Cambridge, MA (US); Muthiah MANOHARAN, Cambridge, MA (US); Akin AKINC, Cambridge, MA (US); Ivan ZLATEV, Cambridge, MA (US)

(73) Assignee: ALNYLAM PHARMACEUTICALS, INC., Cambridge, MA (US)

(21) Appl. No.: 19/019,685

(22) Filed: Jan. 14, 2025

Related U.S. Application Data
(63) Continuation of application No. 17/398,923, filed on Aug. 10, 2021, now Pat. No. 12,241,064.
Application No. 17/398,923 is a continuation of application No. 15/537,083, filed on Jun. 16, 2017, now abandoned.
(60) Provisional application No. 62/093,906, filed on Dec. 18, 2014.
(60) Provisional application No. 62/238,467, filed on Oct. 7, 2015.

(51) Int. Cl. C12N 15/11; C12N 15/113

(52) U.S. Cl. CPC C12N 15/111; C12N 15/113; C12N 2310/113; C12N 2310/315; C12N 2310/3183; C12N 2310/319; C12N 2310/3231; C12N 2310/3341; C12N 2310/346; C12N 2310/351

(57) ABSTRACT

The present invention relates, in general to agents that modulate the pharmacological activity of conjugated siRNAs.

### RELATED APPLICATIONS

[0001] This application is a continuation under 35 U.S.C. § 120 of co-pending U.S. application Ser. No. 17/398,923 filed Aug. 10, 2021, which is a continuation application of U.S. application Ser. No. 15/537,083 filed Jun. 16, 2017 now abandoned, which is a 371 National Phase Entry of International Patent Application No. PCT/US2015/066465, filed on Dec. 17, 2015, which claims benefit under 35 U.S.C. § 119(e) of the U.S. Provisional Application No. 62/093,906, filed Dec. 18, 2014, and U.S. Provisional Application No. 62/238,467, filed Oct. 7, 2015, the contents of both which are incorporated herein by reference in their entireties.

### TECHNICAL FIELD

[0002] The present disclosure relates generally to oligomeric compounds (oligomers), which target siRNAs (e.g. conjugated or unconjugated siRNAs) in vivo, thereby providing a method of tailored control of RNAi pharmacology and therefore the therapeutic activity and/or side effects of siRNA based therapeutics in vivo.

### BACKGROUND

[0003] Conjugated and unconjugated siRNA compounds have been used to modulate target nucleic acids. Conjugated and unconjugated siRNAs comprising a variety of modifications and motifs have been reported. In certain instances, such compounds are useful as research tools and as therapeutic agents.

### SUMMARY OF THE INVENTION

[0004] In certain embodiments, provided herein are REVERSIR compounds (REVERSIR is a trademark of Alnylam Pharmaceuticals, Inc.). Such compounds reduce RNAi activity of a siRNA compound, for example conjugated siRNA or unconjugated siRNA. Generally, the REVERSIR compounds modulate hybridize or bind siRNA molecule in a sequence dependent manner and modulate (e.g., inhibit or reverse) their activity.

[0005] In certain embodiments, the present invention provides REVERSIR compounds that are complementary to at least one strand of siRNA compounds (e.g. conjugated or unconjugated siRNA). In some embodiments, the REVERSIR compounds are complementary to the antisense strand of siRNA compounds. In some other embodiments, the REVERSIR compounds are complementary to the sense strand of siRNA compounds.

[0006] In certain embodiments, the present invention provides REVERSIR compounds comprising a modified oligonucleotide consisting of 6 to 30 linked nucleosides and having a nucleobase sequence substantially complementary to at least one strand of siRNA compounds (e.g. conjugated or unconjugated siRNA). In some embodiments, the REVERSIR compounds comprise a modified oligonucleotide consisting of 6 to 30 linked nucleosides and having a nucleobase sequence substantially complementary to the antisense strand of siRNA compounds. In some other embodiments, the REVERSIR compounds comprise a modified oligonucleotide consisting of 6 to 30 linked nucleosides and having a nucleobase sequence substantially complementary to the sense strand of siRNA compounds.

[0007] In certain such embodiments, the modified oligonucleotide is a single-stranded oligonucleotide and/or is at least 90% complementary to at least one strand of the siRNA. In some embodiments, the modified oligonucleotide is a single-stranded oligonucleotide and/or is at least 90% complementary to the antisense strand of the siRNA. In some other embodiments, the modified oligonucleotide is a single-stranded oligonucleotide and/or is at least 90% complementary to the sense strand of the siRNA.

[0008] In certain embodiments, the REVERSIR compound is fully complementary to at least one strand of the conjugated or unconjugated siRNA. In some embodiments, the REVERSIR compound is fully complementary to the antisense strand of the siRNA. In some other embodiments, the REVERSIR compound is fully complementary to the sense strand of the siRNA.

[0009] In certain embodiments, REVERSIR compounds comprise at least one modified internucleoside or intersugar linkage. In certain such embodiments, at least one (e.g., one, two, three, four, five, six, seven, eight, nine, ten, eleven, twelve, thirteen, fourteen, fifteen or more and up to and including all) internucleoside linkage is a phosphorothioate internucleoside linkage.

[0010] In certain embodiments, REVERSIR compounds comprise at least one nucleoside comprising a modified sugar. In certain such embodiments, the modified sugar is a bicyclic sugar or sugar comprising a 2′-O-methyl or a 2′-O-methoxyethyl.

[0011] In certain embodiments, REVERSIR compounds comprise one or more (e.g., one, two, three, four, five, six, seven, eight, nine, ten, eleven, twelve, thirteen, fourteen, fifteen or more and up to and including all) locked nucleic acid (LNA) monomers.

[0012] In certain embodiments, REVERSIR compounds comprise at least one (e.g., one, two, three, four, five, six, seven, eight, nine, ten or more) nucleotide that does not comprise a 2′-O-methyl group, i.e., the REVERSIR compound is not fully 2′-O-methyl. In some embodiments, each nucleoside in the REVERSIR compound is a 2′-O-methyl nucleoside and the REVERSIR compound comprises at least one (e.g., one, two, three, four, five, six, seven, eight, nine, ten or more) G-clamp nucleobases.

[0013] In certain embodiments, REVERSIR compounds comprise at least one nucleoside comprising a modified nucleobase. In certain such embodiments, the modified nucleobase is a 5-methylcytosine.

[0014] In certain embodiments, REVERSIR compounds comprise at least one modification. In certain such embodiments, REVERSIR compounds comprise one or more nucleoside modifications and or one or more linkage modifications. In certain embodiments, REVERSIR compounds comprise one or more modifications selected from: sugar modifications, linkage modifications, nucleobase modifications, conjugates (e.g., ligands), and any combinations thereof.

[0015] In certain embodiments, REVERSIR compounds comprise a modified oligonucleotide comprising: a gap segment consisting of linked deoxynucleosides; a 5′ wing segment consisting of linked nucleosides; a 3′ wing segment consisting of linked nucleosides; wherein the gap segment is positioned between the 5′ wing segment and the 3′ wing segment and wherein each nucleoside of each wing segment comprises a modified sugar.

[0016] In certain embodiments, REVERSIR compounds comprise a modified oligonucleotide comprising: a gap segment consisting of ten linked deoxynucleosides; a 5′ wing segment consisting of five linked nucleosides; a 3′ wing segment consisting of five linked nucleosides; wherein the gap segment is positioned between the 5′ wing segment and the 3′ wing segment, wherein each nucleoside of each wing segment comprises a 2′-O-methoxyethyl sugar; and wherein each internucleoside linkage is a phosphorothioate linkage.

[0017] In certain embodiments, REVERSIR compound comprises a modified oligonucleotide consisting of 6-17, 7-16 8-15 or 6-25 linked nucleosides. In some embodiments, REVERSIR compound comprises a modified oligonucleotide consisting of 8, 9, 10, 11, 12, 13, 14, 15 or 20 linked nucleosides.

[0018] In certain embodiments, REVERSIR compound comprises a modified oligonucleotide wherein each nucleoside is modified.

[0019] In some embodiments, REVERSIR compound comprises or consists of nine linked nucleosides.

[0020] In some embodiments, REVERSIR compound has low PS content. By low PS content is meant that the REVERSIR compound has 1, 2, 3, 4 or 5 phosphorothioate linkages per nine nucleoids of the REVERSIR compound.

[0021] In some embodiments, REVERSIR compound comprises or consists of nine linked nucleosides and has low PS content.

[0022] In some embodiments, REVERSIR compound consists of nine linked nucleosides and comprises five phosphorothioate linkages.

[0023] In some embodiments, REVERSIR compound consists of nine linked nucleosides, comprises five phosphorothioate linkages and is linked to a ligand.

[0024] In certain embodiments, REVERSIR compounds are complementary to the antisense or sense strand of a conjugated or unconjugated siRNA, wherein the siRNA is targeted to an mRNA. In certain embodiments, the siRNA is targeted to an mRNA encoding a blood factor. In certain embodiments, the siRNA is targeted to an mRNA encoding a protein involved in metabolism. In certain embodiments, the siRNA is targeted to an mRNA encoding a protein involved in diabetes. In certain embodiments, the siRNA is targeted to an mRNA encoding a protein involved in cardiopathology. In certain embodiments, the siRNA is targeted to an mRNA encoding a protein expressed in nerve cells. In certain embodiments, the siRNA is targeted to an mRNA encoding a protein expressed in the central nervous system. In certain embodiments, the siRNA is targeted to an mRNA expressed in peripheral nerves.

[0025] In certain embodiments, the conjugated or unconjugated siRNA is targeted to an mRNA encoding a protein expressed in the liver. In certain embodiments, the siRNA is targeted to an mRNA encoding a protein expressed in the kidney.

[0026] In certain embodiments, the conjugated or unconjugated siRNA is targeted to a pre-mRNA. In certain embodiments, the conjugated or unconjugated siRNA is targeted to a micro-RNA. In certain embodiments, the conjugated or unconjugated siRNA activates the RISC pathway. In some embodiments, the conjugated or unconjugated siRNA inhibits the expression of a target nucleic acid.

[0027] In certain embodiments, REVERSIR compounds modulate the RISC pathway. In some embodiments, REVERSIR compounds inhibit the RISC pathway.

[0028] In certain embodiments, the invention provides a composition comprising a REVERSIR compound or a pharmaceutically acceptable salt thereof and a pharmaceutically acceptable carrier or diluent.

[0029] In certain embodiments, the invention provides methods comprising administering to a subject (e.g., an animal) a REVERSIR compound or composition comprising same. In certain embodiments, the subject is a human. In certain embodiments, the administering is oral, topical, or parenteral.

[0030] In certain embodiments, the invention provides methods of inhibiting RNAi activity of a conjugated or unconjugated siRNA in a cell. The method, generally, comprises contacting the cell with a REVERSIR compound according the present invention and thereby inhibiting the RNAi activity in the cell. In certain such embodiments, the cell is in in vivo. In some embodiments, the cell is in vitro. In some embodiments the cell is ex vivo. In some embodiments, the cell is in a subject. In some further embodiments of this, the cell is an animal. In certain embodiments, the animal is a human.

[0031] In certain embodiments, the invention provides methods comprising: contacting a cell with a conjugated or unconjugated siRNA; detecting RNAi activity; and contacting the cell with a REVERSIR compound. In certain embodiments, the method the detecting RANi activity comprises measuring the amount of target mRNA present, the amount of target protein present, and/or the activity of a target protein. In certain embodiments, such methods comprise detecting REVERSIR activity by measuring RNAi activity after contacting the cell with the REVERSIR compound. In certain such methods, the cell is in vivo. In some embodiments, the cell is in an animal. In certain embodiments, the animal is a human.

[0032] In certain embodiments, the invention provides methods of ameliorating a side-effect of siRNA treatment comprising: contacting a cell with a conjugated or unconjugated siRNA; detecting a side-effect; contacting the cell with a REVERSIR compound; and thereby ameliorating the side effect of the siRNA.

[0033] In certain embodiments, the invention provides methods of treating a patient comprising: administering to the patient a conjugated or unconjugated siRNA; monitoring the patient for siRNA activity; and if the siRNA activity becomes higher than desired, administrating a REVERSIR compound. In certain such embodiments, the monitoring siRNA activity comprises measuring the amount of target mRNA present, measuring the amount of target protein present and/or measuring the activity of a target protein. In certain embodiments, such methods include detecting REVERSIR activity by measuring siRNA activity after administration of the REVERSIR compound. In certain embodiments, the patient is a mammal. In some embodiments, the patient is a human.

[0034] In certain embodiments, the invention provides methods of treating a patient comprising: administering to the patient a conjugated or unconjugated siRNA; monitoring the patient for one or more side effect; and if the one or more side effect reaches an undesirable level, administrating a REVERSIR compound. In certain embodiments, the patient is a mammal. In some embodiments, the patient is a human.

[0035] In certain embodiments, the invention provides a kit comprising a conjugated or unconjugated siRNA and a REVERSIR compound; REVERSIR compound and a non-oligomeric REVERSIR; or conjugated or unconjugated siRNA compound, REVERSIR compound, and a non-oligomeric REVERSIR. In certain such embodiments, the non-oligomeric REVERSIR is a target protein.

### BRIEF DESCRIPTION OF THE DRAWINGS

[0036] FIG. 1 shows in vivo activity of exemplary REVERSIR compounds targeting antithrombin (AT) siRNAs.

[0037] FIG. 2 shows that reversal of activity of siRNAs by REVERSIR compounds in vivo is rapid and dose-dependent. Full reversal can be seen within 4-days of dosing.

[0038] FIG. 3 shows the effect of REVERSIR compound length on the in vivo activity of exemplary REVERSIR compounds. As seen, shorter REVERSIR compounds showed better in vivo activity than the longer REVERSIR compounds.

[0039] FIG. 4 shows the effect of exemplary nucleic acid modifications on the in vivo activity of REVERSIR compounds.

[0040] FIG. 5 shows the effect of number of phosphorothioate internucleoside linkages on the in vivo activity of REVERSIR compounds.

[0041] FIGS. 6 and 7 show that REVERSIR compounds have increased in vivo potency with decreasing length

[0042] FIGS. 8 and 9 shows effect of number phosphorothioate linkages on the activity of REVERSIR compounds.

[0043] FIG. 10 shows further improvement in potency for exemplary REVERSIR compounds.

[0044] FIG. 11 shows in vitro reversal of siRNA activity by free uptake of exemplary REVERSIR compounds targeting antithrombin siRNA in primary mouse hepatocytes.

[0045] FIG. 12 shows in vitro reversal of siRNA activity by free uptake of exemplary REVERSIR compounds targeting antithrombin siRNA in primary mouse hepatocytes at various concentrations.

[0046] FIGS. 13 and 14 show in vitro reversal of siRNA activity by free uptake of exemplary REVERSIR compounds targeting Factor IX siRNAs in primary mouse hepatocytes at various concentrations.

[0047] FIG. 15 shows the effect of high-affinity chemistry on the in vivo activity of exemplary REVERSIR compounds targeting Factor IX siRNAs.

[0048] FIGS. 16 and 17 show the effect of REVERSIR compound length on the in vivo activity of exemplary REVERSIR compounds targeting Factor IX siRNAs. REVERSIR compounds were administered at 3 mg/kg (FIG. 16) and 1 mg/kg (FIG. 17)

[0049] FIG. 18 shows the effect of linker, between the REVERSIR compound and the ligand conjugated with the REVERSIR compound, on the in vivo activity of exemplary REVERSIR compounds targeting Factor IX siRNAs.

[0050] FIG. 19 shows the effect of phosphorothioate linkages in the REVERSIR compound on the in vivo activity of exemplary REVERSIR compounds targeting Factor IX siRNAs.

[0051] FIG. 20 shows the effect of linker, between the REVERSIR compound and the ligand conjugated with the REVERSIR compound, on the in vitro activity of exemplary REVERSIR compounds targeting Factor IX siRNAs.

[0052] FIG. 21 shows the effect on activity of siRNA by exemplary REVERSIR compounds matching certain portion of the antisense strand of the siRNA.

[0053] FIG. 22 shows in vivo dos-dependent effect of exemplary REVERSIR compounds targeting Factor IX siRNA.

[0054] FIG. 23 shows that REVERSIR compounds are tolerated in vivo.

[0055] FIG. 24 shows in vivo reversal of siRNA activity by some exemplary REVERSIR compounds in non-human primates.

### DETAILED DESCRIPTION OF THE INVENTION

[0056] It is to be understood that both the foregoing general description and the following detailed description are exemplary and explanatory only and are not restrictive of the invention, as claimed. Herein, the use of the singular includes the plural unless specifically stated otherwise. As used herein, the use of “or” means “and/or” unless stated otherwise. Furthermore, the use of the term “including” as well as other forms, such as “includes” and “included”, is not limiting. Also, terms such as “element” or “component” encompass both elements and components comprising one unit and elements and components that comprise more than one subunit, unless specifically stated otherwise.

[0057] The section headings used herein are for organizational purposes only and are not to be construed as limiting the subject matter described. All documents, or portions of documents, cited in this application, including, but not limited to, patents, patent applications, articles, books, and treatises, are hereby expressly incorporated by reference in their entirety for any purpose.

### Definitions

[0058] Unless specific definitions are provided, the nomenclature utilized in connection with, and the procedures and techniques of, analytical chemistry, synthetic organic chemistry, and medicinal and pharmaceutical chemistry described herein are those well known and commonly used in the art. Standard techniques may be used for chemical synthesis, and chemical analysis. Certain such techniques and procedures may be found for example in “Carbohydrate Modifications in Antisense Research” Edited by Sangvi and Cook, American Chemical Society, Washington D.C., 1994; “Remington's Pharmaceutical Sciences,” Mack Publishing Co., Easton, Pa., 18th edition, 1990; and “Antisense Drug Technology, Principles, Strategies, and Applications” Edited by Stanley T. Crooke, CRC Press, Boca Raton, Fla.; and Sambrook et al., “Molecular Cloning, A laboratory Manual,” 2^{nd} Edition, Cold Spring Harbor Laboratory Press, 1989, which are hereby incorporated by reference for any purpose. Where permitted, all patents, applications, published applications and other publications and other data referred to throughout in the disclosure herein are incorporated by reference in their entirety.

[0059] Unless otherwise indicated, the following terms have the following meanings:

[0060] As used herein, the term “nucleoside” means a glycosylamine comprising a nucleobase and a sugar. Nucleosides includes, but are not limited to, naturally occurring nucleosides, abasic nucleosides, modified nucleosides, and nucleosides having mimetic bases and/or sugar groups.

[0061] As used herein, the term “nucleotide” refers to a glycosamine comprising a nucleobase and a sugar having a phosphate group covalently linked to the sugar. Nucleotides may be modified with any of a variety of substituents.

[0062] As used herein, the term “nucleobase” refers to the base portion of a nucleoside or nucleotide. A nucleobase may comprise any atom or group of atoms capable of hydrogen bonding to a base of another nucleic acid.

[0063] As used herein, the term “heterocyclic base moiety” refers to a nucleobase comprising a heterocycle.

[0064] As used herein, the term “oligomeric compound” refers to a polymeric structure comprising two or more sub-structures and capable of hybridizing to a region of a nucleic acid molecule. In certain embodiments, oligomeric compounds are oligonucleosides. In certain embodiments, oligomeric compounds are oligonucleotides. In certain embodiments, oligomeric compounds are antisense compounds. In certain embodiments, oligomeric compounds are REVERSIR compounds. In certain embodiments, oligomeric compounds comprise conjugate groups.

[0065] As used herein “oligonucleoside” refers to an oligonucleotide in which the internucleoside linkages do not contain a phosphorus atom.

[0066] As used herein, the term “oligonucleotide” refers to an oligomeric compound comprising a plurality of linked nucleosides. In certain embodiment, one or more nucleotides of an oligonucleotide is modified. In certain embodiments, an oligonucleotide comprises ribonucleic acid (RNA) or deoxyribonucleic acid (DNA). In certain embodiments, oligonucleotides are composed of naturally- and/or non-naturally-occurring nucleobases, sugars and covalent internucleoside linkages, and may further include non-nucleic acid conjugates.

[0067] As used herein “internucleoside linkage” refers to a covalent linkage between adjacent nucleosides.

[0068] As used herein “naturally occurring internucleoside linkage” refers to a 3′ to 5′ phosphodiester linkage.

[0069] As used herein the term “detecting siRNA activity” or “measuring siRNA activity” means that a test for detecting or measuring siRNA activity is performed on a particular sample and compared to that of a control sample. Such detection and/or measuring can include values of zero. Thus, if a test for detection of siRNA activity results in a finding of no siRNA activity (siRNA activity of zero), the step of “detecting siRNA activity” has nevertheless been performed.

[0070] As used herein the term “control sample” refers to a sample that has not been contacted with a reporter oligomeric compound.

[0071] As used herein, the term “motif” refers to the pattern of unmodified and modified nucleotides in an oligomeric compound.

[0072] As used herein, the term “REVERSIR compound” refers to an oligomeric compound that is complementary to and capable of hybridizing with at least one strand of a conjugated or unconjugated siRNA. Without limitations, the REVERSIR compound could not only block unintended target PD effect but also block any potential off-target activity that could happen with a conjugated or unconjugated siRNA.

[0073] As used herein, the term “non-oligomeric REVERSIR” refers to a compound that does not hybridize with a strand of siRNA and that reduces the amount or duration of a siRNA activity. In certain embodiments, a non-oligomeric REVERSIR is a target protein.

[0074] As used herein, the term “REVERSIR activity” refers to any decrease in intensity or duration of any siRNA activity attributable to hybridization of a REVERSIR compound to one of the strands of the siRNA.

[0075] As used herein, the term “chimeric oligomer” refers to an oligomeric compound, having at least one sugar, nucleobase or internucleoside linkage that is differentially modified as compared to at least on other sugar, nucleobase or internucleoside linkage within the same oligomeric compound. The remainder of the sugars, nucleobases and internucleoside linkages can be independently modified or unmodified, the same or different.

[0076] As used herein, the term “chimeric oligonucleotide” refers to an oligonucleotide, having at least one sugar, nucleobase or internucleoside linkage that is differentially modified as compared to at least on other sugar, nucleobase or internucleoside linkage within the same oligonucleotide. The remainder of the sugars, nucleobases and internucleoside linkages can be independently modified or unmodified, the same or different.

[0077] As used herein, the term “mixed-backbone oligomeric compound” refers to an oligomeric compound wherein at least one internucleoside linkage of the oligomeric compound is different from at least one other internucleoside linkage of the oligomeric compound.

[0078] As used herein, the term “target protein” refers to a protein, the modulation of which is desired.

[0079] As used herein, the term “target gene” refers to a gene encoding a target protein.

[0080] As used herein, the term “target nucleic acid” refers to any nucleic acid molecule the expression or activity of which is capable of being modulated by a conjugated or unconjugated siRNA compound. Target nucleic acids include, but are not limited to, RNA (including, but not limited to pre-mRNA and mRNA or portions thereof) transcribed from DNA encoding a target protein, and also cDNA derived from such RNA, and miRNA. For example, the target nucleic acid can be a cellular gene (or mRNA transcribed from the gene) whose expression is associated with a particular disorder or disease state, or a nucleic acid molecule from an infectious agent.

[0081] As used herein, the term “target siRNA” refers to a siRNA compound that is targeted by a REVERSIR compound.

[0082] As used herein, the term “targeting” or “targeted to” refers to the association of antisense strand of a siRNA to a particular target nucleic acid molecule or a particular region of nucleotides within a target nucleic acid molecule.

[0083] As used herein, the term “nucleobase complementarity” refers to a nucleobase that is capable of base pairing with another nucleobase. For example, in DNA, adenine (A) is complementary to thymine (T). For example, in RNA, adenine (A) is complementary to uracil (U). In certain embodiments, complementary nucleobase refers to a nucleobase of an antisense compound that is capable of base pairing with a nucleobase of its target nucleic acid. For example, if a nucleobase at a certain position of an antisense compound is capable of hydrogen bonding with a nucleobase at a certain position of a target nucleic acid, then the position of hydrogen bonding between the oligonucleotide and the target nucleic acid is considered to be complementary at that nucleobase pair.

[0084] As used herein, the term “non-complementary nucleobase” refers to a pair of nucleobases that do not form hydrogen bonds with one another or otherwise support hybridization.

[0085] As used herein, the term “complementary” refers to the capacity of an oligomeric compound to hybridize to another oligomeric compound or nucleic acid through nucleobase complementarity. In certain embodiments, an oligomeric compound and its target are complementary to each other when a sufficient number of corresponding positions in each molecule are occupied by nucleobases that can bond with each other to allow stable association between the antisense compound and the target. One skilled in the art recognizes that the inclusion of mismatches is possible without eliminating the ability of the oligomeric compounds to remain in association. Therefore, described herein are oligomeric compounds (e.g., REVERSIR compounds, siRNAs, and the like) that may comprise up to about 20% nucleotides that are mismatched (i.e., are not nucleobase complementary to the corresponding nucleotides of the target). Preferably the oligomeric compounds, such as REVERSIR compounds and siRNAs, contain no more than about 15%, more preferably not more than about 10%, most preferably not more than 5% or no mismatches. The remaining nucleotides are nucleobase complementary or otherwise do not disrupt hybridization (e.g., universal bases). One of ordinary skill in the art would recognize the compounds provided herein are at least 80%, at least 85%, at least 90%, at least 95%, at least 96%, at least 97%, at least 98%, at least 99% or 100% complementary to a target nucleic acid.

[0086] As used herein, “hybridization” means the pairing of complementary oligomeric compounds (e.g., an antisense strand of a siRNA and its target nucleic acid or a REVERSIR to its target siRNA). While not limited to a particular mechanism, the most common mechanism of pairing involves hydrogen bonding, which may be Watson-Crick, Hoogsteen or reversed Hoogsteen hydrogen bonding, between complementary nucleoside or nucleotide bases (nucleobases). For example, the natural base adenine is nucleobase complementary to the natural nucleobases thymidine and uracil which pair through the formation of hydrogen bonds. The natural base guanine is nucleobase complementary to the natural bases cytosine and 5-methyl cytosine. Hybridization can occur under varying circumstances.

[0087] As used herein, the term “specifically hybridizes” refers to the ability of an oligomeric compound to hybridize to one nucleic acid site with greater affinity than it hybridizes to another nucleic acid site. In certain embodiments, the antisense strand of an siRNA specifically hybridizes to more than one target site.

[0088] As used herein, “designing” or “designed to” refer to the process of designing an oligomeric compound that specifically hybridizes with a selected nucleic acid molecule.

[0089] As used herein, the term “modulation” refers to a perturbation of function or activity when compared to the level of the function or activity prior to modulation. For example, modulation includes the change, either an increase (stimulation or induction) or a decrease (inhibition or reduction) in gene expression. As further example, modulation of expression can include perturbing splice site selection of pre-mRNA processing.

[0090] As used herein, the term “expression” refers to all the functions and steps by which a gene's coded information is converted into structures present and operating in a cell. Such structures include, but are not limited to the products of transcription and translation.

[0091] As used herein, “variant” refers to an alternative RNA transcript that can be produced from the same genomic region of DNA. Variants include, but are not limited to “pre-mRNA variants” which are transcripts produced from the same genomic DNA that differ from other transcripts produced from the same genomic DNA in either their start or stop position and contain both intronic and exonic sequence. Variants also include, but are not limited to, those with alternate splice junctions, or alternate initiation and termination codons.

[0092] As used herein, “high-affinity modified monomer” refers to a monomer having at least one modified nucleobase, internucleoside linkage or sugar moiety, when compared to naturally occurring monomers, such that the modification increases the affinity of an antisense compound comprising the high-affinity modified monomer to its target nucleic acid. High-affinity modifications include, but are not limited to, monomers (e.g., nucleosides and nucleotides) comprising 2′-modified sugars.

[0093] As used herein, the term “2′-modified” or “2′-substituted” means a sugar comprising substituent at the 2′ position other than H or OH. 2′-modified monomers, include, but are not limited to, BNA's and monomers (e.g., nucleosides and nucleotides) with 2′-substituents, such as allyl, amino, azido, thio, O-allyl, O—C₁-C₁₀ alkyl, OCF3, O—(CH₂)₂—O—CH₃, 2′—O(CH₂)₂SCH₃, O—(CH₂)₂—ON(Rm)(Rn), or O—CH₂—C(═O)—N(Rm)(Rn), where each Rm and Rn is, independently, H or substituted or unsubstituted C₁-C₁₀ alkyl. In certain embodiments, oligomeric compounds comprise a 2′ modified monomer that does not have the formula 2′-O(CH₂)ₙH, wherein n is one to six. In certain embodiments, oligomeric compounds comprise a 2′ modified monomer that does not have the formula 2′-OCH₃. In certain embodiments, oligomeric compounds comprise a 2′ modified monomer that does not have the formula or, in the alternative, 2′-O(CH₂)₂OCH₃.

[0094] As used herein, the term “locked nucleic acid” or “LNA” or “locked nucleoside” or “locked nucleotide” refers to a nucleoside or nucleotide wherein the furanose portion of the nucleoside includes a bridge connecting two carbon atoms on the furanose ring, thereby forming a bicyclic ring system. Locked nucleic acids are also referred to as bicyclic nucleic acids (BNA).

[0095] As used herein, unless otherwise indicated, the term “methyleneoxy LNA” alone refers to β-D-methyleneoxy LNA.

[0096] As used herein, the term “MOE” refers to a 2′-O-methoxyethyl substituent.

[0097] As used herein, the term “gapmer” refers to a chimeric oligomeric compound comprising a central region (a “gap”) and a region on either side of the central region (the “wings”), wherein the gap comprises at least one modification that is different from that of each wing. Such modifications include nucleobase, monomeric linkage, and sugar modifications as well as the absence of modification (unmodified). Thus, in certain embodiments, the nucleotide linkages in each of the wings are different than the nucleotide linkages in the gap. In certain embodiments, each wing comprises nucleotides with high affinity modifications and the gap comprises nucleotides that do not comprise that modification. In certain embodiments the nucleotides in the gap and the nucleotides in the wings all comprise high affinity modifications, but the high affinity modifications in the gap are different than the high affinity modifications in the wings. In certain embodiments, the modifications in the wings are the same as one another. In certain embodiments, the modifications in the wings are different from each other. In certain embodiments, nucleotides in the gap are unmodified and nucleotides in the wings are modified. In certain embodiments, the modification(s) in each wing are the same. In certain embodiments, the modification(s) in one wing are different from the modification(s) in the other wing. In certain embodiments, oligomeric compounds are gapmers having 2′-deoxynucleotides in the gap and nucleotides with high-affinity modifications in the wing.

[0098] As used herein, the term “prodrug” refers to a therapeutic agent that is prepared in an inactive form that is converted to an active form (i.e., drug) within the body or cells thereof by the action of endogenous enzymes or other chemicals and/or conditions.

[0099] As used herein, the term “pharmaceutically acceptable salts” refers to salts of active compounds that retain the desired biological activity of the active compound and do not impart undesired toxicological effects thereto.

[0100] As used herein, the term “cap structure” or “terminal cap moiety” refers to chemical modifications, which have been incorporated at either terminus of an antisense compound.

[0101] As used herein, the term “prevention” refers to delaying or forestalling the onset or development of a condition or disease for a period of time from hours to days, preferably weeks to months.

[0102] As used herein, the term “amelioration” refers to a lessening of at least one activity or one indicator of the severity of a condition or disease. The severity of indicators may be determined by subjective or objective measures which are known to those skilled in the art.

[0103] As used herein, the term “treatment” refers to administering a composition of the invention to effect an alteration or improvement of the disease or condition. Prevention, amelioration, and/or treatment may require administration of multiple doses at regular intervals, or prior to onset of the disease or condition to alter the course of the disease or condition. Moreover, a single agent may be used in a single individual for each prevention, amelioration, and treatment of a condition or disease sequentially, or concurrently.

[0104] As used herein, the term “pharmaceutical agent” refers to a substance that provides a therapeutic benefit when administered to a subject. In certain embodiments, a pharmaceutical agent is an active pharmaceutical agent. In certain embodiments, a pharmaceutical agent is a prodrug.

[0105] As used herein, the term “therapeutically effective amount” refers to an amount of a pharmaceutical agent that provides a therapeutic benefit to an animal.

[0106] As used herein, “administering” means providing a pharmaceutical agent to an animal, and includes, but is not limited to administering by a medical professional and self-administering.

[0107] As used herein, the term “co-administering” means providing more than one pharmaceutical agent to an animal. In certain embodiments, such more than one pharmaceutical agents are administered together. In certain embodiments, such more than one pharmaceutical agents are administered separately. In certain embodiments, such more than one pharmaceutical agents are administered at the same time. In certain embodiments, such more than one pharmaceutical agents are administered at different times. In certain embodiments, such more than one pharmaceutical agents are administered through the same route of administration. In certain embodiments, such more than one pharmaceutical agents are administered through different routes of administration. In certain embodiments, such more than one pharmaceutical agents are contained in the same pharmaceutical formulation. In certain embodiments, such more than one pharmaceutical agents are in separate formulations.

[0108] As used herein, the term “pharmaceutical composition” refers to a mixture of substances suitable for administering to an individual. For example, a pharmaceutical composition may comprise an antisense oligonucleotide and a sterile aqueous solution. In certain embodiments, a pharmaceutical composition includes a pharmaceutical agent and a diluent and/or carrier.

[0109] As used herein, the term “in vitro” refers to events that occur in an artificial environment, e.g., in a test tube or reaction vessel, in cell culture, etc., rather than within an organism (e.g. animal or a plant). As used herein, the term “ex vivo” refers to cells which are removed from a living organism and cultured outside the organism (e.g., in a test tube). As used herein, the term “in vivo” refers to events that occur within an organism (e.g. animal, plant, and/or microbe).

[0110] As used herein, the term “subject” or “patient” refers to any organism to which a composition disclosed herein can be administered, e.g., for experimental, diagnostic, and/or therapeutic purposes. Typical subjects include animals (e.g., mammals such as mice, rats, rabbits, non-human primates, and humans) and/or plants. Usually the animal is a vertebrate such as a primate, rodent, domestic animal or game animal. Primates include chimpanzees, cynomolgous monkeys, spider monkeys, and macaques, e.g., Rhesus. Rodents include mice, rats, woodchucks, ferrets, rabbits and hamsters. Domestic and game animals include cows, horses, pigs, deer, bison, buffalo, feline species, e.g., domestic cat, canine species, e.g., dog, fox, wolf, avian species, e.g., chicken, emu, ostrich, and fish, e.g., trout, catfish and salmon. Patient or subject includes any subset of the foregoing, e.g., all of the above, but excluding one or more groups or species such as humans, primates or rodents. In certain embodiments of the aspects described herein, the subject is a mammal, e.g., a primate, e.g., a human. The terms, “patient” and “subject” are used interchangeably herein. A subject can be male or female.

[0111] Preferably, the subject is a mammal. The mammal can be a human, non-human primate, mouse, rat, dog, cat, horse, or cow, but are not limited to these examples. Mammals other than humans can be advantageously used as subjects that represent animal models of human diseases and disorders. In addition, compounds, compositions and methods described herein can be used to with domesticated animals and/or pets.

[0112] In one embodiment, the subject is human. In another embodiment, the subject is an experimental animal or animal substitute as a disease model. The term does not denote a particular age or sex. Thus, adult and newborn subjects, as well as fetuses, whether male or female, are intended to be covered. Examples of subjects include humans, dogs, cats, cows, goats, and mice. The term subject is further intended to include transgenic species. In some embodiments, the subject can be of European ancestry. In some embodiments, the subject can be of African American ancestry. In some embodiments, the subject can be of Asian ancestry.

[0113] In jurisdictions that forbid the patenting of methods that are practiced on the human body, the meaning of “administering” of a composition to a human subject shall be restricted to prescribing a controlled substance that a human subject will self-administer by any technique (e.g., orally, inhalation, topical application, injection, insertion, etc.). The broadest reasonable interpretation that is consistent with laws or regulations defining patentable subject matter is intended. In jurisdictions that do not forbid the patenting of methods that are practiced on the human body, the “administering” of compositions includes both methods practiced on the human body and also the foregoing activities.

[0114] As used herein, the term “parenteral administration,” refers to administration through injection or infusion. Parenteral administration includes, but is not limited to, subcutaneous administration, intravenous administration, or intramuscular administration.

[0115] As used herein, the term “subcutaneous administration” refers to administration just below the skin. “Intravenous administration” means administration into a vein.

[0116] As used herein, the term “dose” refers to a specified quantity of a pharmaceutical agent provided in a single administration. In certain embodiments, a dose may be administered in two or more boluses, tablets, or injections. For example, in certain embodiments, where subcutaneous administration is desired, the desired dose requires a volume not easily accommodated by a single injection. In such embodiments, two or more injections may be used to achieve the desired dose. In certain embodiments, a dose may be administered in two or more injections to minimize injection site reaction in an individual.

[0117] As used herein, the term “dosage unit” refers to a form in which a pharmaceutical agent is provided. In certain embodiments, a dosage unit is a vial comprising lyophilized antisense oligonucleotide. In certain embodiments, a dosage unit is a vial comprising reconstituted antisense oligonucleotide.

[0118] As used herein, the term “active pharmaceutical ingredient” refers to the substance in a pharmaceutical composition that provides a desired effect.

[0119] As used herein, the term “side effects” refers to physiological responses attributable to a treatment other than desired effects. In certain embodiments, side effects include, without limitation, injection site reactions, liver function test abnormalities, renal function abnormalities, liver toxicity, renal toxicity, central nervous system abnormalities, and myopathies. For example, increased aminotransferase levels in serum may indicate liver toxicity or liver function abnormality. For example, increased bilirubin may indicate liver toxicity or liver function abnormality.

[0120] As used herein, the term “alkyl,” as used herein, refers to a saturated straight or branched hydrocarbon radical containing up to twenty four carbon atoms. Examples of alkyl groups include, but are not limited to, methyl, ethyl, propyl, butyl, isopropyl, n-hexyl, octyl, decyl, dodecyl and the like. Alkyl groups typically include from 1 to about 24 carbon atoms, more typically from 1 to about 12 carbon atoms (C1-C12 alkyl) with from 1 to about 6 carbon atoms being more preferred. The term “lower alkyl” as used herein includes from 1 to about 6 carbon atoms. Alkyl groups as used herein may optionally include one or more further substituent groups.

[0121] As used herein, the term “alkenyl,” as used herein, refers to a straight or branched hydrocarbon chain radical containing up to twenty four carbon atoms and having at least one carbon-carbon double bond. Examples of alkenyl groups include, but are not limited to, ethenyl, propenyl, butenyl, 1-methyl-2-buten-1-yl, dienes such as 1,3-butadiene and the like. Alkenyl groups typically include from 2 to about 24 carbon atoms, more typically from 2 to about 12 carbon atoms with from 2 to about 6 carbon atoms being more preferred. Alkenyl groups as used herein may optionally include one or more further substituent groups.

[0122] As used herein, the term “alkynyl,” as used herein, refers to a straight or branched hydrocarbon radical containing up to twenty four carbon atoms and having at least one carbon-carbon triple bond. Examples of alkynyl groups include, but are not limited to, ethynyl, 1-propynyl, 1-butynyl, and the like. Alkynyl groups typically include from 2 to about 24 carbon atoms, more typically from 2 to about 12 carbon atoms with from 2 to about 6 carbon atoms being more preferred. Alkynyl groups as used herein may optionally include one or more further substitutent groups.

[0123] As used herein, the term “aminoalkyl” as used herein, refers to an amino substituted alkyl radical. This term is meant to include C1-C12 alkyl groups having an amino substituent at any position and wherein the alkyl group attaches the aminoalkyl group to the parent molecule. The alkyl and/or amino portions of the aminoalkyl group can be further substituted with substituent groups.

[0124] As used herein, the term “aliphatic,” as used herein, refers to a straight or branched hydrocarbon radical containing up to twenty four carbon atoms wherein the saturation between any two carbon atoms is a single, double or triple bond. An aliphatic group preferably contains from 1 to about 24 carbon atoms, more typically from 1 to about 12 carbon atoms with from 1 to about 6 carbon atoms being more preferred. The straight or branched chain of an aliphatic group may be interrupted with one or more heteroatoms that include nitrogen, oxygen, sulfur and phosphorus. Such aliphatic groups interrupted by heteroatoms include without limitation polyalkoxys, such as polyalkylene glycols, polyamines, and polyimines. Aliphatic groups as used herein may optionally include further substitutent groups.

[0125] As used herein, the term “alicyclic” or “alicyclyl” refers to a cyclic ring system wherein the ring is aliphatic. The ring system can comprise one or more rings wherein at least one ring is aliphatic. Preferred alicyclics include rings having from about 5 to about 9 carbon atoms in the ring. Alicyclic as used herein may optionally include further substitutent groups. As used herein, the term “alkoxy,” as used herein, refers to a radical formed between an alkyl group and an oxygen atom wherein the oxygen atom is used to attach the alkoxy group to a parent molecule. Examples of alkoxy groups include, but are not limited to, methoxy, ethoxy, propoxy, isopropoxy, n-butoxy, sec-butoxy, tert-butoxy, n-pentoxy, neopentoxy, n-hexoxy and the like. Alkoxy groups as used herein may optionally include further substitutent groups. As used herein, the terms “halo” and “halogen,” as used herein, refer to an atom selected from fluorine, chlorine, bromine and iodine.

[0126] As used herein, the terms “aryl” and “aromatic,” as used herein, refer to a mono- or polycyclic carbocyclic ring system radicals having one or more aromatic rings. Examples of aryl groups include, but are not limited to, phenyl, naphthyl, tetrahydronaphthyl, indanyl, idenyl and the like. Preferred aryl ring systems have from about 5 to about 20 carbon atoms in one or more rings. Aryl groups as used herein may optionally include further substitutent groups.

[0127] As used herein, the terms “aralkyl” and “arylalkyl,” as used herein, refer to a radical formed between an alkyl group and an aryl group wherein the alkyl group is used to attach the aralkyl group to a parent molecule. Examples include, but are not limited to, benzyl, phenethyl and the like. Aralkyl groups as used herein may optionally include further substitutent groups attached to the alkyl, the aryl or both groups that form the radical group.

[0128] As used herein, the term “heterocyclic radical” as used herein, refers to a radical mono-, or poly-cyclic ring system that includes at least one heteroatom and is unsaturated, partially saturated or fully saturated, thereby including heteroaryl groups. Heterocyclic is also meant to include fused ring systems wherein one or more of the fused rings contain at least one heteroatom and the other rings can contain one or more heteroatoms or optionally contain no heteroatoms. A heterocyclic group typically includes at least one atom selected from sulfur, nitrogen or oxygen. Examples of heterocyclic groups include, [1,3]dioxolane, pyrrolidinyl, pyrazolinyl, pyrazolidinyl, imidazolinyl, imidazolidinyl, piperidinyl, piperazinyl, oxazolidinyl, isoxazolidinyl, morpholinyl, thiazolidinyl, isothiazolidinyl, quinoxalinyl, pyridazinonyl, tetrahydrofuryl and the like. Heterocyclic groups as used herein may optionally include further substitutent groups. As used herein, the terms “heteroaryl,” and “heteroaromatic,” as used herein, refer to a radical comprising a mono- or poly-cyclic aromatic ring, ring system or fused ring system wherein at least one of the rings is aromatic and includes one or more heteroatom. Heteroaryl is also meant to include fused ring systems including systems where one or more of the fused rings contain no heteroatoms. Heteroaryl groups typically include one ring atom selected from sulfur, nitrogen or oxygen. Examples of heteroaryl groups include, but are not limited to, pyridinyl, pyrazinyl, pyrimidinyl, pyrrolyl, pyrazolyl, imidazolyl, thiazolyl, oxazolyl, isooxazolyl, thiadiazolyl, oxadiazolyl, thiophenyl, furanyl, quinolinyl, isoquinolinyl, benzimidazolyl, benzooxazolyl, quinoxalinyl, and the like. Heteroaryl radicals can be attached to a parent molecule directly or through a linking moiety such as an aliphatic group or hetero atom. Heteroaryl groups as used herein may optionally include further substitutent groups.

[0129] As used herein, the term “heteroarylalkyl,” as used herein, refers to a heteroaryl group as previously defined having an alky radical that can attach the heteroarylalkyl group to a parent molecule. Examples include, but are not limited to, pyridinylmethyl, pyrimidinylethyl, napthyridinylpropyl and the like. Heteroarylalkyl groups as used herein may optionally include further substitutent groups on one or both of the heteroaryl or alkyl portions.

[0130] As used herein, the term “mono or poly cyclic structure” as used in the present invention includes all ring systems that are single or polycyclic having rings that are fused or linked and is meant to be inclusive of single and mixed ring systems individually selected from aliphatic, alicyclic, aryl, heteroaryl, aralkyl, arylalkyl, heterocyclic, heteroaryl, heteroaromatic, heteroarylalkyl. Such mono and poly cyclic structures can contain rings that are uniform or have varying degrees of saturation including fully saturated, partially saturated or fully unsaturated. Each ring can comprise ring atoms selected from C, N, O and S to give rise to heterocyclic rings as well as rings comprising only C ring atoms which can be present in a mixed motif such as for example benzimidazole wherein one ring has only carbon ring atoms and the fused ring has two nitrogen atoms. The mono or poly cyclic structures can be further substituted with substituent groups such as for example phthalimide which has two ═O groups attached to one of the rings. In another aspect, mono or poly cyclic structures can be attached to a parent molecule directly through a ring atom, through a substituent group or a bifunctional linking moiety.

[0131] As used herein, the term “acyl,” as used herein, refers to a radical formed by removal of a hydroxyl group from an organic acid and has the general formula —C(O)—X where X is typically aliphatic, alicyclic or aromatic. Examples include aliphatic carbonyls, aromatic carbonyls, aliphatic sulfonyls, aromatic sulfinyls, aliphatic sulfinyls, aromatic phosphates, aliphatic phosphates and the like. Acyl groups as used herein may optionally include further substitutent groups.

[0132] As used herein, the term “hydrocarbyl” includes groups comprising C, O and H. Included are straight, branched and cyclic groups having any degree of saturation. Such hydrocarbyl groups can include one or more heteroatoms selected from N, O and S and can be further mono or poly substituted with one or more substituent groups.

[0133] As used herein, the terms “substituent” and “substituent group,” as used herein, include groups that are typically added to other groups or parent compounds to enhance desired properties or give desired effects. Substituent groups can be protected or unprotected and can be added to one available site or to many available sites in a parent compound. Substituent groups may also be further substituted with other substituent groups and may be attached directly or via a linking group such as an alkyl or hydrocarbyl group to a parent compound. Such groups include without limitation, halogen, hydroxyl, alkyl, alkenyl, alkynyl, acyl (—C(O)Raa), carboxyl (—C(O)O-Raa), aliphatic groups, alicyclic groups, alkoxy, substituted oxo (—O—Raa), aryl, aralkyl, heterocyclic, heteroaryl, heteroarylalkyl, amino (—NRbbRcc), imino (═NRbb), amido (—C(O)N-RbbRcc or N(Rbb)C(O)Raa), azido (—N3), nitro (—NO2), cyano (—CN), carbamido (—OC(O)NRbbRcc or —N(Rbb)C(O)ORaa), ureido (—N(Rbb)C(O)NRbbRcc), thioureido (—N(Rbb)C(S)NRbbRcc), guanidinyl (—N(Rbb)C(═NRbb)NRbbRcc), amidinyl (—C(═NRbb)-NRbbRcc or —N(Rbb)C(NRbb)Raa), thiol (—SRbb), sulfinyl (—S(O)Rbb), sulfonyl (—S(O)2Rbb), sulfonamidyl (—S(O)₂NRbbRcc or —N(Rbb)S(O)₂Rbb) and conjugate groups. Wherein each Raa, Rbb and Rcc is, independently, H, an optionally linked chemical functional group or a further substituent group with a preferred list including without limitation H, alkyl, alkenyl, alkynyl, aliphatic, alkoxy, acyl, aryl, aralkyl, heteroaryl, alicyclic, heterocyclic and heteroarylalkyl.

[0134] The REVERSIR compounds disclosed herein are particularly effective in reducing the activity of siRNAs. For example, the REVERSIR compounds disclosed herein can reduce the activity of an siRNA by at least about 50%, or at least about 60%, or at least about 70%, or at least about 80%, or at least about 90%, or at least about 95%, or at least about 97%, or at least about 99% or up to and including a 100% decrease (i.e., absent level as compared to a reference sample), or any decrease between 50-100% as compared to a reference level. The reference level can be siRNA activity in absence of the REVERSIR compound.

[0135] In some embodiments, the REVERSIR compounds describe herein can reduce the activity of the siRNA by at least 75%, for example by 80%, 85%, 90%, 95% or more and up to and including completer reduction or inhibition of siRNA activity, within less than seven (e.g., within 6 days, five days, four days, three days, two days or one day) of administering or use of the REVERSIR compound.

[0136] In some embodiments, the REVERSIR compounds can completely reduce the siRNA activity within four days of administering or use of the REVERSIR compound. By complete reduction of siRNA activity is meant a reduction of the siRNA activity by at least 80% relative to a reference level.

### Oligomeric Compounds

[0137] In certain embodiments, the siRNA and/or the REVERSIR compounds are oligomeric compounds. In certain embodiments, it is desirable to chemically modify oligomeric compounds, including siRNAs and/or REVERSIR compounds, compared to naturally occurring oligomers, such as DNA or RNA. Certain such modifications alter the activity of the oligomeric compound. Certain such chemical modifications can alter activity by, for example: increasing affinity of a siRNA for its target nucleic acid or a REVERSIR for its target siRNA, increasing its resistance to one or more nucleases, and/or altering the pharmacokinetics or tissue distribution of the oligomeric compound. In certain instances, the use of chemistries that increase the affinity of an oligomeric compound for its target can allow for the use of shorter oligomeric compounds.

### Monomers

[0138] In certain embodiment, oligomeric compounds comprise one or more modified monomer. In certain such embodiments, oligomeric compounds comprise one or more high affinity monomer. In certain embodiments, such high-affinity monomer is selected from monomers (e.g., nucleosides and nucleotides) comprising 2′-modified sugars, including, but not limited to: BNA's and monomers (e.g., nucleosides and nucleotides) with 2′-substituents such as allyl, amino, azido, thio, O-allyl, O—C₁-C₁₀ alkyl, OCF₃, O—(CH₂)₂—O—CH₃, 2′—O(CH₂)₂SCH₃, O—(CH₂)₂—O—N(Rm)(Rn), or O—CH₂—C(═O)—N(Rm)(Rn), where each Rm and Rn is, independently, H or substituted or unsubstituted C₁-C₁₀ alkyl.

[0139] In certain embodiments, the oligomeric compounds including, but not limited to REVERSIR compounds and siRNAs of the present invention, comprise one or more high affinity monomers.

[0140] In certain embodiments, the oligomeric compounds including, but not limited to REVERSIR compounds and siRNAs of the present invention, comprise one or more 3-D-Methyleneoxy (4′-CH₂—O-2′) LNA monomers.

[0141] In certain embodiments, the oligomeric compounds including, including, but not limited to REVERSIR compounds and siRNAs of the present invention, comprise one or more α-D-Methyleneoxy (4′-CH₂—O-2′) LNA monomers.

[0142] In certain embodiments, the oligomeric compounds including, including, but not limited to REVERSIR compounds and siRNAs of the present invention, comprise one or more (S)-cEt monomers.

[0143] In certain embodiments, the oligomeric compounds including, but not limited to REVERSIR compounds and siRNAs of the present invention, comprise one or more high affinity monomers provided that the oligomeric compound does not comprise a nucleotide comprising a 2′-O(CH₂)ₙH, wherein n is one to six.

[0144] In certain embodiments, the oligomeric compounds including, but not limited to REVERSIR compounds and siRNAs, comprise one or more high affinity monomer provided that the oligomeric compound does not comprise a nucleotide comprising a 2′-OCH₃ or a 2′-O(CH₂)₂OCH₃.

[0145] In certain embodiments, the oligomeric compounds including, but not limited to REVERSIR compounds and siRNAs, comprise one or more (e.g., 1, 2, 3, 4, 5, 6, 7, 8, 9, 10, 11, 12, 13, 14, 15 or more) high affinity monomer provided that the oligomeric compound does not comprise a α-L-Methyleneoxy (4′-CH₂—O-2′) LNA.

[0146] In certain embodiments, the oligomeric compounds including, but no limited to REVERSIR compounds and siRNAs, comprise one or more high affinity monomer provided that the oligomeric compound does not comprise a β-D-Methyleneoxy (4′-CH₂—O-2′) LNA.

[0147] In certain embodiments, the oligomeric compounds including, but no limited to REVERSIR compound and siRNAs, comprise one or more high affinity monomer provided that the oligomeric compound does not comprise a α-L-Methyleneoxy (4′-CH₂—O-2′) LNA or β-D-Methyleneoxy (4′-CH₂—O-2′) LNA.

### Certain Nucleobases

[0148] The naturally occurring base portion of a nucleoside is typically a heterocyclic base. The two most common classes of such heterocyclic bases are the purines and the pyrimidines. For those nucleosides that include a pentofuranosyl sugar, a phosphate group can be linked to the 2′, 3′ or 5′ hydroxyl moiety of the sugar. In forming oligonucleotides, those phosphate groups covalently link adjacent nucleosides to one another to form a linear polymeric compound. Within oligonucleotides, the phosphate groups are commonly referred to as forming the internucleoside backbone of the oligonucleotide. The naturally occurring linkage or backbone of RNA and of DNA is a 3′ to 5′ phosphodiester linkage.

[0149] In addition to “unmodified” or “natural” nucleobases such as the purine nucleobases adenine (A) and guanine (G), and the pyrimidine nucleobases thymine (T), cytosine (C) and uracil (U), many modified nucleobases or nucleobase mimetics known to those skilled in the art are amenable with the compounds described herein. The unmodified or natural nucleobases can be modified or replaced to provide oligonucleotides having improved properties. For example, nuclease resistant oligonucleotides can be prepared with these bases or with synthetic and natural nucleobases (e.g., inosine, xanthine, hypoxanthine, nebularine, isoguanosine, or tubercidin) and any one of the oligomer modifications described herein. Alternatively, substituted or modified analogs of any of the above bases and “universal bases” can be employed. When a natural base is replaced by a non-natural and/or universal base, the nucleotide is said to comprise a modified nucleobase and/or a nucleobase modification herein. Modified nucleobase and/or nucleobase modifications also include natural, non-natural and universal bases, which comprise conjugated moieties, e.g. a ligand described herein. Preferred conjugate moieties for conjugation with nucleobases include cationic amino groups which can be conjugated to the nucleobase via an appropriate alkyl, alkenyl or a linker with an amide linkage.

[0150] An oligomeric compound described herein can also include nucleobase (often referred to in the art simply as “base”) modifications or substitutions. As used herein, “unmodified” or “natural” nucleobases include the purine bases adenine (A) and guanine (G), and the pyrimidine bases thymine (T), cytosine (C) and uracil (U). Exemplary modified nucleobases include, but are not limited to, other synthetic and natural nucleobases such as inosine, xanthine, hypoxanthine, nebularine, isoguanosine, tubercidin, 2-(halo)adenine, 2-(alkyl)adenine, 2-(propyl)adenine, 2-(amino)adenine, 2-(aminoalkyl)adenine, 2-(aminopropyl)adenine, 2-(methylthio)-N⁶-(isopentenyl)adenine, 6-(alkyl)adenine, 6-(methyl)adenine, 7-(deaza)adenine, 8-(alkenyl)adenine, 8-(alkyl)adenine, 8-(alkynyl)adenine, 8-(amino)adenine, 8-(halo)adenine, 8-(hydroxyl)adenine, 8-(thioalkyl)adenine, 8-(thiol)adenine, N⁶-(isopentyl)adenine, N⁶-(methyl)adenine, N⁶,N⁶-(dimethyl)adenine, 2-(alkyl)guanine,2-(propyl)guanine, 6-(alkyl)guanine, 6-(methyl)guanine, 7-(alkyl)guanine, 7-(methyl)guanine, 7-(deaza)guanine, 8-(alkyl)guanine, 8-(alkenyl)guanine, 8-(alkynyl)guanine, 8-(amino)guanine, 8-(halo)guanine, 8-(hydroxyl)guanine, 8-(thioalkyl)guanine, 8-(thiol)guanine, N-(methyl)guanine, 2-(thio)cytosine, 3-(deaza)-5-(aza)cytosine, 3-(alkyl)cytosine, 3-(methyl)cytosine, 5-(alkyl)cytosine, 5-(alkynyl)cytosine, 5-(halo)cytosine, 5-(methyl)cytosine, 5-(propynyl)cytosine, 5-(propynyl)cytosine, 5-(trifluoromethyl)cytosine, 6-(azo)cytosine, N⁴-(acetyl)cytosine, 3-(3-amino-3-carboxypropyl)uracil, 2-(thio)uracil, 5-(methyl)-2-(thio)uracil, 5-(methylaminomethyl)-2-(thio)uracil, 4-(thio)uracil, 5-(methyl)-4-(thio)uracil, 5-(methylaminomethyl)-4-(thio)uracil, 5-(methyl)-2,4-(dithio)uracil, 5-(methylaminomethyl)-2,4-(dithio)uracil, 5-(2-aminopropyl)uracil, 5-(alkyl)uracil, 5-(alkynyl)uracil, 5-(allylamino)uracil, 5-(aminoallyl)uracil, 5-(aminoalkyl)uracil, 5-(guanidiniumalkyl)uracil, 5-(1,3-diazole-1-alkyl)uracil, 5-(cyanoalkyl)uracil, 5-(dialkylaminoalkyl)uracil, 5-(dimethylaminoalkyl)uracil, 5-(halo)uracil, 5-(methoxy)uracil, uracil-5-oxyacetic acid, 5-(methoxycarbonylmethyl)-2-(thio)uracil, 5-(methoxycarbonyl-methyl)uracil, 5-(propynyl)uracil, 5-(propynyl)uracil, 5-(trifluoromethyl)uracil, 6-(azo)uracil, dihydrouracil, N³-(methyl)uracil, 5-uracil (i.e., pseudouracil), 2-(thio)pseudouracil,4-(thio)pseudouracil,2,4-(dithio)pseudouracil,5-(alkyl)pseudouracil, 5-(methyl)pseudouracil, 5-(alkyl)-2-(thio)pseudouracil, 5-(methyl)-2-(thio)pseudouracil, 5-(alkyl)-4-(thio)pseudouracil, 5-(methyl)-4-(thio)pseudouracil, 5-(alkyl)-2,4-(dithio)pseudouracil, 5-(methyl)-2,4-(dithio)pseudouracil, 1-substituted pseudouracil, 1-substituted 2(thio)-pseudouracil, 1-substituted 4-(thio)pseudouracil, 1-substituted 2,4-(dithio)pseudouracil, 1-(aminocarbonylethylenyl)-pseudouracil, 1-(aminocarbonylethylenyl)-2(thio)-pseudouracil, 1-(aminocarbonylethylenyl)-4-(thio)pseudouracil, 1-(aminocarbonylethylenyl)-2,4-(dithio)pseudouracil, 1-(aminoalkylaminocarbonylethylenyl)-pseudouracil, 1-(aminoalkylamino-carbonylethylenyl)-2(thio)-pseudouracil, 1-(aminoalkylaminocarbonylethylenyl)-4-(thio)pseudouracil, 1-(aminoalkylaminocarbonylethylenyl)-2,4-(dithio)pseudouracil, 1,3-(diaza)-2-(oxo)-phenoxazin-1-yl, 1-(aza)-2-(thio)-3-(aza)-phenoxazin-1-yl, 1,3-(diaza)-2-(oxo)-phenthiazin-1-yl, 1-(aza)-2-(thio)-3-(aza)-phenthiazin-1-yl, 7-substituted 1,3-(diaza)-2-(oxo)-phenoxazin-1-yl, 7-substituted 1-(aza)-2-(thio)-3-(aza)-phenoxazin-1-yl, 7-substituted 1,3-(diaza)-2-(oxo)-phenthiazin-1-yl, 7-substituted 1-(aza)-2-(thio)-3-(aza)-phenthiazin-1-yl, 7-(aminoalkylhydroxy)-1,3-(diaza)-2-(oxo)-phenoxazin-1-yl, 7-(aminoalkylhydroxy)-1-(aza)-2-(thio)-3-(aza)-phenoxazin-1-yl, 7-(aminoalkylhydroxy)-1,3-(diaza)-2-(oxo)-phenthiazin-1-yl, 7-(aminoalkylhydroxy)-1-(aza)-2-(thio)-3-(aza)-phenthiazin-1-yl, 7-(guanidiniumalkylhydroxy)-1,3-(diaza)-2-(oxo)-phenoxazin-1-yl, 7-(guanidiniumalkylhydroxy)-1-(aza)-2-(thio)-3-(aza)-phenoxazin-1-yl, 7-(guanidiniumalkyl-hydroxy)-1,3-(diaza)-2-(oxo)-phenthiazin-1-yl, 7-(guanidiniumalkylhydroxy)-1-(aza)-2-(thio)-3-(aza)-phenthiazin-1-yl, 1,3,5-(triaza)-2,6-(dioxa)-naphthalene, inosine, xanthine, hypoxanthine, nebularine, tubercidin, isoguanosine, inosinyl, 2-aza-inosinyl, 7-deaza-inosinyl, nitroimidazolyl, nitropyrazolyl, nitrobenzimidazolyl, nitroindazolyl, aminoindolyl, pyrrolopyrimidinyl, 3-(methyl)isocarbostyrilyl, 5-(methyl)isocarbostyrilyl, 3-(methyl)-7-(propynyl)isocarbostyrilyl, 7-(aza)indolyl, 6-(methyl)-7-(aza)indolyl, imidizopyridinyl, 9-(methyl)-imidizopyridinyl, pyrrolopyrazinyl, isocarbostyrilyl, 7-(propynyl)isocarbostyrilyl, propynyl-7-(aza)indolyl, 2,4,5-(trimethyl)phenyl, 4-(methyl)indolyl, 4,6-(dimethyl)indolyl, phenyl, napthalenyl, anthracenyl, phenanthracenyl, pyrenyl, stilbenyl, tetracenyl, pentacenyl, difluorotolyl, 4-(fluoro)-6-(methyl)benzimidazole, 4-(methyl)benzimidazole, 6-(azo)thymine, 2-pyridinone, 5-nitroindole, 3-nitropyrrole, 6-(aza)pyrimidine, 2-(amino)purine, 2,6-(diamino)purine, 5-substituted pyrimidines, N²-substituted purines, N⁶-substituted purines, O⁶-substituted purines, substituted 1,2,4-triazoles, pyrrolo-pyrimidin-2-on-3-yl, 6-phenyl-pyrrolo-pyrimidin-2-on-3-yl, para-substituted-6-phenyl-pyrrolo-pyrimidin-2-on-3-yl, ortho-substituted-6-phenyl-pyrrolo-pyrimidin-2-on-3-yl, bis-ortho-substituted-6-phenyl-pyrrolo-pyrimidin-2-on-3-yl, para-(aminoalkylhydroxy)-6-phenyl-pyrrolo-pyrimidin-2-on-3-yl, ortho-(aminoalkylhydroxy)-6-phenyl-pyrrolo-pyrimidin-2-on-3-yl, bis-ortho-(aminoalkylhydroxy)-6-phenyl-pyrrolo-pyrimidin-2-on-3-yl, pyridopyrimidine-3-yl, 2-oxo-7-amino-pyridopyrimidine-3-yl, 2-oxo-pyridopyrimidine-3-yl, or any O-alkylated or N-alkylated derivatives thereof. Alternatively, substituted or modified analogs of any of the above bases and “universal bases” can be employed.

[0151] As used herein, a universal nucleobase is any nucleobase that can base pair with all of the four naturally occurring nucleobases without substantially affecting the melting behavior, recognition by intracellular enzymes or activity of the oligonucleotide duplex. Some exemplary universal nucleobases include, but are not limited to, 2,4-difluorotoluene, nitropyrrolyl, nitroindolyl, 8-aza-7-deazaadenine, 4-fluoro-6-methylbenzimidazole, 4-methylbenzimidazole, 3-methyl isocarbostyrilyl, 5-methyl isocarbostyrilyl, 3-methyl-7-propynyl isocarbostyrilyl, 7-azaindolyl, 6-methyl-7-azaindolyl, imidizopyridinyl, 9-methyl-imidizopyridinyl, pyrrolopyrazinyl, isocarbostyrilyl, 7-propynyl isocarbostyrilyl, propynyl-7-azaindolyl, 2,4,5-trimethylphenyl, 4-methylindolyl, 4,6-dimethylindolyl, phenyl, napthalenyl, anthracenyl, phenanthracenyl, pyrenyl, stilbenyl, tetracenyl, pentacenyl, and structural derivatives thereof (see for example, Loakes, 2001, Nucleic Acids Research, 29, 2437-2447).

[0152] Further nucleobases include those disclosed in U.S. Pat. No. 3,687,808; those disclosed in International Application No. PCT/US09/038425, filed Mar. 26, 2009; those disclosed in the Concise Encyclopedia Of Polymer Science And Engineering, pages 858-859, Kroschwitz, J. I., ed. John Wiley & Sons, 1990; those disclosed by English et al., Angewandte Chemie, International Edition, 1991, 30, 613; those disclosed in Modified Nucleosides in Biochemistry, Biotechnology and Medicine, Herdewijin, P.Ed. Wiley-VCH, 2008; and those disclosed by Sanghvi, Y. S., Chapter 15, dsRNA Research and Applications, pages 289-302, Crooke, S. T. and Lebleu, B., Eds., CRC Press, 1993. Contents of all of the above are herein incorporated by reference.

[0153] In certain embodiments, a modified nucleobase is a nucleobase that is fairly similar in structure to the parent nucleobase, such as for example a 7-deaza purine, a 5-methyl cytosine, or a G-clamp. In certain embodiments, nucleobase mimetic include more complicated structures, such as for example a tricyclic phenoxazine nucleobase mimetic. Methods for preparation of the above noted modified nucleobases are well known to those skilled in the art.

[0154] In some embodiments, the REVERSIR compound comprises at least one (e.g., 1, 2, 3, 4, 5, 6, 7, 8, 9, 10, 11, 12, 13, 14, 15 or more) G-clamp nucleobase selected from the following:

[chemical structure]

[chemical structure]

[chemical structure]

[chemical structure]

[chemical structure]

where n is 0, 1, 2, 3, 4, 5 or 6.

### Certain Sugars

[0155] Oligomeric compounds provided herein can comprise one or more monomer, including a nucleoside or nucleotide, having a modified sugar moiety. For example, the furanosyl sugar ring of a nucleoside can be modified in a number of ways including, but not limited to, addition of a substituent group, bridging of two non-geminal ring atoms to form a locked nucleic acid or bicyclic nucleic acid. In certain embodiments, oligomeric compounds comprise one or more monomers that are LNA.

[0156] In some embodiments of a locked nucleic acid, the 2′ position of furanosyl is connected to the 4′ position by a linker selected independently from —[C(R1)(R2)]ₙ—, —[C(R1)(R2)]ₙ—O—, —[C(R1)(R2)]ₙ—N(R1)—, —[C(R1)(R2)]ₙ—N(R1)—O—, —[C(R1R2)]ₙ—O—N(R1)—, —C(R1)═C(R2)—O—, —C(R1)═N—, —C(R1)═N—O—, —C(═NR1)—, —C(═NR1)—O—, —C(═O)—, —C(═O)O—, —C(═S)—, —C(═S)O—, —C(═S)S—, —O—, —Si(R1)₂—, —S(═O)ₓ— and —N(R1)—;
[0157] wherein:
[0158] x is 0, 1, or 2;
[0159] n is 1, 2, 3, or 4;
[0160] each R1 and R2 is, independently, H, a protecting group, hydroxyl, C1-C12 alkyl, substituted C₁-C₁₂ alkyl, C2-C12 alkenyl, substituted C₂-C₁₂ alkenyl, C2-C12 alkynyl, substituted C₂-C₁₂ alkynyl, C5-C20 aryl, substituted C5-C20 aryl, heterocycle radical, substituted heterocycle radical, heteroaryl, substituted heteroaryl, C5-C7 alicyclic radical, substituted C5-C7 alicyclic radical, halogen, OJ1, NJ1J2, SJ1, N3, COOJ1, acyl (C(═O) H), substituted acyl, CN, sulfonyl (S(═O)₂-J1), or sulfoxyl (S(═O)-J1); and
[0161] each J1 and J2 is, independently, H, C1-C12 alkyl, substituted C₁-C₁₂ alkyl, C2-C12 alkenyl, substituted C2-C12 alkenyl, C2-C12 alkynyl, substituted C₂-C₁₂ alkynyl, C5-C20 aryl, substituted C5-C20 aryl, acyl (C(═O)—H), substituted acyl, a heterocycle radical, a substituted heterocycle radical, C1-C12 aminoalkyl, substituted C1-C12 aminoalkyl or a protecting group.

[0162] In one embodiment, each of the linkers of the LNA compounds is, independently, [C(R1)(R2)]ₙ—, [C(R1)(R2)]ₙ—O—, C(R1R2)—N(R1)—O or C(R1R2)—O—N(R1)—.

[0163] In another embodiment, each of said linkers is, independently, 4′-CH₂-2′, 4′—(CH₂)₂-2′, 4′—(CH₂)₃-2′, 4′—CH₂—O-2′, 4′—(CH₂)₂—O-2′, 4′—CH₂—O—N(R1)-2′ and 4′-CH₂—N(R1)—O-2′—wherein each R1 is, independently, H, a protecting group or C1-C12 alkyl.

[0164] Certain LNA's have been prepared and disclosed in the patent literature as well as in scientific literature (Singh et al., Chem. Commun., 1998, 4, 455-456; Koshkin et al., Tetrahedron, 1998, 54, 3607-3630; Wahlestedt et al., Proc. Natl. Acad. Sci. U.S.A., 2000, 97, 5633-5638; Kumar et al., Bioorg. Med. Chem. Lett., 1998, 8, 2219-2222; WO 94/14226; WO 2005/021570; Singh et al., J. Org. Chem., 1998, 63, 10035-10039; Examples of issued US patents and published applications that disclose LNA s include, for example, U.S. Pat. Nos. 7,053,207; 6,268,490; 6,770,748; 6,794,499; 7,034,133; and 6,525,191; and U.S. Pre-Grant Publication Nos. 2004-0171570; 2004-0219565; 2004-0014959; 2003-0207841; 2004-0143114; and 20030082807.

[0165] Also provided herein are LNAs in which the 2′-hydroxyl group of the ribosyl sugar ring is linked to the 4′ carbon atom of the sugar ring thereby forming a methyleneoxy (4′-CH₂—O-2′) linkage to form the bicyclic sugar moiety (reviewed in Elayadi et al., Curr. Opinion Invens. Drugs, 2001, 2, 558-561; Braasch et al., Chem. Biol., 2001, 8 1-7; and Orum et al., Curr. Opinion Mol. Ther., 2001, 3, 239-243; see also U.S. Pat. Nos. 6,268,490 and 6,670,461). The linkage can be a methylene (—CH₂—) group bridging the 2′ oxygen atom and the 4′ carbon atom, for which the term methyleneoxy (4′-CH₂—O-2′) LNA is used for the bicyclic moiety; in the case of an ethylene group in this position, the term ethyleneoxy (4′-CH₂CH₂—O-2′) LNA is used (Singh et al., Chem. Commun., 1998, 4, 455-456: Morita et al., Bioorganic Medicinal Chemistry, 2003, 11, 2211-2226). Methyleneoxy (4′-CH₂—O-2′) LNA and other bicyclic sugar analogs display very high duplex thermal stabilities with complementary DNA and RNA (Tm=+3 to +10° C.), stability towards 3′-exonucleolytic degradation and good solubility properties. Potent and nontoxic antisense oligonucleotides comprising BNAs have been described (Wahlestedt et al., Proc. Natl. Acad. Sci. U.S.A., 2000, 97, 5633-5638).

[0166] An isomer of methyleneoxy (4′-CH₂—O-2′) LNA that has also been discussed is alpha-L-methyleneoxy (4′-CH₂—O-2′) LNA which has been shown to have superior stability against a 3′-exonuclease. The alpha-L-methyleneoxy (4′-CH₂—O-2′) LNA's were incorporated into antisense gapmers and chimeras that showed potent antisense activity (Frieden et al., Nucleic Acids Research, 2003, 21, 6365-6372).

[0167] The synthesis and preparation of the methyleneoxy (4′-CH₂—O-2′) LNA monomers adenine, cytosine, guanine, 5-methyl-cytosine, thymine and uracil, along with their oligomerization, and nucleic acid recognition properties have been described (Koshkin et al., Tetrahedron, 1998, 54, 3607-3630). BNAs and preparation thereof are also described in WO 98/39352 and WO 99/14226.

[0168] Analogs of methyleneoxy (4′-CH₂—O-2′) LNA, phosphorothioate-methyleneoxy (4′-CH₂—O-2′) LNA and 2′-thio-LNAs, have also been prepared (Kumar et al., Bioorg. Med. Chem. Lett., 1998, 8, 2219-2222). Preparation of locked nucleoside analogs comprising oligodeoxyribonucleotide duplexes as substrates for nucleic acid polymerases has also been described (Wengel et al., WO 99/14226). Furthermore, synthesis of 2′-amino-LNA, a novel conformationally restricted high-affinity oligonucleotide analog has been described in the art (Singh et al., J. Org. Chem., 1998, 63, 10035-10039). In addition, 2′-Amino- and 2′-methylamino-LNA's have been prepared and the thermal stability of their duplexes with complementary RNA and DNA strands has been previously reported.

[0169] Modified sugar moieties are well known and can be used to alter, typically increase, the affinity of the antisense compound for its target and/or increase nuclease resistance. A representative list of preferred modified sugars includes but is not limited to bicyclic modified sugars, including methyleneoxy (4′-CH₂—O-2′) LNA and ethyleneoxy (4′—(CH₂)₂—O-2′ bridge) ENA; substituted sugars, especially 2′-substituted sugars having a 2′-F, 2′-OCH₃ or a 2′-O(CH₂)₂—OCH₃ substituent group; and 4′-thio modified sugars. Sugars can also be replaced with sugar mimetic groups among others. Methods for the preparations of modified sugars are well known to those skilled in the art. Some representative patents and publications that teach the preparation of such modified sugars include, but are not limited to, U.S. Pat. Nos. 4,981,957; 5,118,800; 5,319,080; 5,359,044; 5,393,878; 5,446,137; 5,466,786; 5,514,785; 5,519,134; 5,567,811; 5,576,427; 5,591,722; 5,597,909; 5,610,300; 5,627,053; 5,639,873; 5,646,265; 5,658,873; 5,670,633; 5,792,747; 5,700,920; 6,531,584; and 6,600,032; and WO 2005/121371.

[0170] Examples of “oxy”-2′ hydroxyl group modifications include alkoxy or aryloxy (OR, e.g., R═H, alkyl, cycloalkyl, aryl, aralkyl, heteroaryl or sugar); polyethyleneglycols (PEG), O(CH₂CH₂O)ₙCH₂CH₂OR, n=1-50; “locked” nucleic acids (LNA) in which the furanose portion of the nucleoside includes a bridge connecting two carbon atoms on the furanose ring, thereby forming a bicyclic ring system; O-AMINE or O—(CH₂)ₙAMINE (n=1-10, AMINE=NH₂; alkylamino, dialkylamino, heterocyclyl, arylamino, diaryl amino, heteroaryl amino, diheteroaryl amino, ethylene diamine or polyamino); and O—CH₂CH₂(NCH₂CH₂NMe₂)₂.

[0171] “Deoxy” modifications include hydrogen (i.e. deoxyribose sugars, which are of particular relevance to the single-strand overhangs); halo (e.g., fluoro); amino (e.g. NH₂; alkylamino, dialkylamino, heterocyclyl, arylamino, diaryl amino, heteroaryl amino, diheteroaryl amino, or amino acid); NH(CH₂CH₂NH)ₙCH₂CH₂-AMINE (AMINE=NH₂; alkylamino, dialkylamino, heterocyclyl, arylamino, diaryl amino, heteroaryl amino, or diheteroaryl amino); —NHC(O)R (R=alkyl, cycloalkyl, aryl, aralkyl, heteroaryl or sugar); cyano; mercapto; alkyl-thio-alkyl; thioalkoxy; thioalkyl; alkyl; cycloalkyl; aryl; alkenyl and alkynyl, which can be optionally substituted with e.g., an amino functionality.

[0172] Other suitable 2′-modifications, e.g., modified MOE, are described in U.S. Patent Application Publication No. 20130130378, contents of which are herein incorporated by reference.

[0173] A modification at the 2′ position can be present in the arabinose configuration The term “arabinose configuration” refers to the placement of a substituent on the C2′ of ribose in the same configuration as the 2′-OH is in the arabinose.

[0174] The sugar can comprise two different modifications at the same carbon in the sugar, e.g., gem modification. The sugar group can also contain one or more carbons that possess the opposite stereochemical configuration than that of the corresponding carbon in ribose. Thus, an oligomeric compound can include one or more monomers containing e.g., arabinose, as the sugar. The monomer can have an alpha linkage at the 1′ position on the sugar, e.g., alpha-nucleosides. The monomer can also have the opposite configuration at the 4′-position, e.g., C5′ and H4′ or substituents replacing them are interchanged with each other. When the C5′ and H4′ or substituents replacing them are interchanged with each other, the sugar is said to be modified at the 4′ position.

[0175] Oligomeric compounds can also include abasic sugars, i.e., a sugar which lack a nucleobase at C-1′ or has other chemical groups in place of a nucleobase at C1′. See for example U.S. Pat. No. 5,998,203, content of which is herein incorporated in its entirety. These abasic sugars can also be further containing modifications at one or more of the constituent sugar atoms. Oligomeric compounds can also contain one or more sugars that are the L isomer, e.g. L-nucleosides. Modification to the sugar group can also include replacement of the 4′-O with a sulfur, optionally substituted nitrogen or CH₂ group. In some embodiments, linkage between C1′ and nucleobase is in a configuration.

[0176] Sugar modifications can also include acyclic nucleotides, wherein a C—C bonds between ribose carbons (e.g., C1′—C2′, C2′—C3′, C3′—C4′, C4′—O4′, C1′—O4′) is absent and/or at least one of ribose carbons or oxygen (e.g., C1′, C2′, C3′, C4′ or O4′) are independently or in combination absent from the nucleotide. In some embodiments, acyclic nucleotide is

[chemical structure]

wherein B is a modified or unmodified nucleobase, R₁ and R₂ independently are H, halogen, OR₃, or alkyl; and R₃ is H, alkyl, cycloalkyl, aryl, aralkyl, heteroaryl or sugar).

[0177] In some embodiments, sugar modifications are selected from the group consisting of 2′-H, 2′-O-Me (2′-O-methyl), 2′-O-MOE (2′-O-methoxyethyl), 2′-F, 2′-O-[2-(methylamino)-2-oxoethyl](2′-O-NMA), 2′-S-methyl, 2′-O—CH₂-(4′-C) (LNA), 2′-O—CH₂CH₂-(4′-C) (ENA), 2′-O-aminopropyl (2′-O-AP), 2′-O-dimethylaminoethyl (2′-O-DMAOE), 2′-O-dimethylaminopropyl (2′-O-DMAP), 2′-O-dimethylaminoethyloxyethyl (2′-O-DMAEOE) and gem 2′-OMe/2′F with 2′-O-Me in the arabinose configuration.

[0178] It is to be understood that when a particular nucleotide is linked through its 2′-position to the next nucleotide, the sugar modifications described herein can be placed at the 3′-position of the sugar for that particular nucleotide, e.g., the nucleotide that is linked through its 2′-position. A modification at the 3′ position can be present in the xylose configuration The term “xylose configuration” refers to the placement of a substituent on the C3′ of ribose in the same configuration as the 3′-OH is in the xylose sugar.

[0179] The hydrogen attached to C4′ and/or C1′ can be replaced by a straight- or branched—optionally substituted alkyl, optionally substituted alkenyl, optionally substituted alkynyl, wherein backbone of the alkyl, alkenyl and alkynyl can contain one or more of O, S, S(O), SO₂, N(R′), C(O), N(R′)C(O)O, OC(O)N(R′), CH(Z′), phosphorous containing linkage, optionally substituted aryl, optionally substituted heteroaryl, optionally substituted heterocyclic or optionally substituted cycloalkyl, where R′ is hydrogen, acyl or optionally substituted aliphatic, Z′ is selected from the group consisting of OR₁₁, COR₁₁, CO₂R₁₁,

[chemical structure]

NR₂₁R₃₁, CONR₂₁R₃₁, CON (−)NR₂₁R₃₁, ONR₂₁R₃₁, CON(H)N═CR₄₁R₅₁, N(R₂₁)C(═NR₃₁)NR₂₁R₃₁, N(R₂₁)C(O)NR₂₁R₃₁, N(R₂₁)C(S)NR₂₁R₃₁, OC(O)NR₂₁R₃₁, SC(O)NR₂₁R₃₁, N(R₂₁)C(S)OR₁₁, N(R₂₁)C(O)OR₁₁, N(R₂₁)C(O)SR₁₁, N(R₂₁)N═CR₄₁, ON═CR₄₁R₅₁, SO₂R₁₁, SOR₁₁, SR₁₁, and substituted or unsubstituted heterocyclic; R₂₁ and R₃₁ for each occurrence are independently hydrogen, acyl, unsubstituted or substituted aliphatic, aryl, heteroaryl, heterocyclic, OR₁₁, COR₁₁, CO₂R₁₁, or NR₁₁R_{11′}; or R₂₁ and R₃₁, taken together with the atoms to which they are attached, form a heterocyclic ring; R₄₁ and R₅₁ for each occurrence are independently hydrogen, acyl, unsubstituted or substituted aliphatic, aryl, heteroaryl, heterocyclic, OR₁₁, COR₁₁, or CO₂R₁₁, or NR₁₁R_{11′}; and R₁₁ and R_{11′} are independently hydrogen, aliphatic, substituted aliphatic, aryl, heteroaryl, or heterocyclic. In some embodiments, the hydrogen attached to the C4′ of the 5′ terminal nucleotide is replaced.

[0180] In some embodiments, C4′ and C5′ together form an optionally substituted heterocyclic, preferably comprising at least one —PX(Y)—, wherein X is H, OH, OM, SH, optionally substituted alkyl, optionally substituted alkoxy, optionally substituted alkylthio, optionally substituted alkylamino or optionally substituted dialkylamino, where M is independently for each occurrence an alki metal or transition metal with an overall charge of +1; and Y is O, S, or NR′, where R′ is hydrogen, optionally substituted aliphatic. Preferably this modification is at the 5 terminal of the oligonucleotide.

[0181] In certain embodiments, LNA's include bicyclic nucleoside having the formula:

[chemical structure]

[0182] wherein:
[0183] Bx is a heterocyclic base moiety;
[0184] T1 is H or a hydroxyl protecting group;
[0185] T2 is H, a hydroxyl protecting group or a reactive phosphorus group;
[0186] Z is C1-C6 alkyl, C2-C6 alkenyl, C2-C6 alkynyl, substituted C1-C6 alkyl, substituted C2-C6 alkenyl, substituted C2-C6 alkynyl, acyl, substituted acyl, or substituted amide.

[0187] In one embodiment, each of the substituted groups, is, independently, mono or poly substituted with optionally protected substituent groups independently selected from halogen, oxo, hydroxyl, OJ1, NJ1J2, SJ1, N3, OC(═X)J1, OC(═X)NJ1J2, NJ3C(═X)NJ1J2 and CN, wherein each J1, J2 and J3 is, independently, H or C₁-C₆ alkyl, and X is O, S or NJ1.

[0188] In certain such embodiments, each of the substituted groups, is, independently, mono or poly substituted with substituent groups independently selected from halogen, oxo, hydroxyl, OJ1, NJ1J2, SJ1, N3, OC(═X)J1, and NJ3C(═X)NJ1J2, wherein each J1, J2 and J3 is, independently, H, C1-C6 alkyl, or substituted C1-C6 alkyl and X is O or NJ 1.

[0189] In certain embodiments, the Z group is C1-C6 alkyl substituted with one or more Xx, wherein each Xx is independently OJ1, NJ1J2, SJ1, N3, OC(═X)J1, OC(═X)NJ1J2, NJ3C(═X)NJ1J2 or CN; wherein each J1, J2 and J3 is, independently, H or C1-C6 alkyl, and X is O, S or NJ1. In another embodiment, the Z group is C1-C6 alkyl substituted with one or more Xx, wherein each Xx is independently halo (e.g., fluoro), hydroxyl, alkoxy (e.g., CH3O—), substituted alkoxy or azido.

[0190] In certain embodiments, the Z group is —CH₂Xx, wherein Xx is OJ1, NJ1J2, SJ1, N3, OC(═X)J1, OC(═X)NJ1J2, NJ3C(═X)NJ1J2 or CN; wherein each J1, J2 and J3 is, independently, H or C1-C6 alkyl, and X is O, S or NJ1. In another embodiment, the Z group is —CH2Xx, wherein Xx is halo (e.g., fluoro), hydroxyl, alkoxy (e.g., CH3O—) or azido.

[0191] In certain such embodiments, the Z group is in the (R)-configuration:

[chemical structure]

[0192] In certain such embodiments, the Z group is in the (S)-configuration:

[chemical structure]

[0193] In certain embodiments, each T1 and T2 is a hydroxyl protecting group. A preferred list of hydroxyl protecting groups includes benzyl, benzoyl, 2,6-dichlorobenzyl, t-butyldimethylsilyl, t-butyldiphenylsilyl, mesylate, tosylate, dimethoxytrityl (DMT), 9-phenylxanthine-9-yl (Pixyl) and 9-(p-methoxyphenyl)xanthine-9-yl (MOX). In certain embodiments, T1 is a hydroxyl protecting group selected from acetyl, benzyl, t-butyldimethylsilyl, t-butyldiphenylsilyl and dimethoxytrityl wherein a more preferred hydroxyl protecting group is T1 is 4,4′-dimethoxytrityl.

[0194] In certain embodiments, T2 is a reactive phosphorus group wherein preferred reactive phosphorus groups include diisopropylcyanoethoxy phosphoramidite and H-phosphonate. In certain embodiments T1 is 4,4′-dimethoxytrityl and T2 is diisopropylcyanoethoxy phosphoramidite.

[0195] In certain embodiments, oligomeric compounds have at least one monomer of the formula:

[chemical structure]

or of the formula:

[chemical structure]

or of the formula:

[chemical structure]

[0196] wherein
[0197] Bx is a heterocyclic base moiety;
[0198] T3 is H, a hydroxyl protecting group, a linked conjugate group or an internucleoside linking group attached to a nucleoside, a nucleotide, an oligonucleoside, an oligonucleotide, a monomeric subunit or an oligomeric compound;
[0199] T4 is H, a hydroxyl protecting group, a linked conjugate group or an internucleoside linking group attached to a nucleoside, a nucleotide, an oligonucleoside, an oligonucleotide, a monomeric subunit or an oligomeric compound;
[0200] wherein at least one of T3 and T4 is an internucleoside linking group attached to a nucleoside, a nucleotide, an oligonucleoside, an oligonucleotide, a monomeric subunit or an oligomeric compound; and
[0201] Z is C1-C6 alkyl, C2-C6 alkenyl, C2-C6 alkynyl, substituted C1-C6 alkyl, substituted C2-C6 alkenyl, substituted C2-C6 alkynyl, acyl, substituted acyl, or substituted amide.

[0202] In one embodiment, each of the substituted groups, is, independently, mono or poly substituted with optionally protected substituent groups independently selected from halogen, oxo, hydroxyl, OJ1, NJ1J2, SJ1, N3, OC(═X)J1, OC(═X)NJ1J2, NJ3C(═X)NJ1J2 and CN, wherein each J1, J2 and J3 is, independently, H or C1-C6 alkyl, and X is O, S or NJ1.

[0203] In one embodiment, each of the substituted groups, is, independently, mono or poly substituted with substituent groups independently selected from halogen, oxo, hydroxyl, OJ1, NJ1J2, SJ1, N3, OC(═X)J1, and NJ3C(═X)NJ1J2, wherein each J1, J2 and J3 is, independently, H or C1-C6 alkyl, and X is O or NJ1.

[0204] In certain such embodiments, at least one Z is C1-C6 alkyl or substituted C1-C6 alkyl. In certain embodiments, each Z is, independently, C1-C6 alkyl or substituted C1-C6 alkyl. In certain embodiments, at least one Z is C1-C6 alkyl. In certain embodiments, each Z is, independently, C1-C6 alkyl. In certain embodiments, at least one Z is methyl. In certain embodiments, each Z is methyl. In certain embodiments, at least one Z is ethyl. In certain embodiments, each Z is ethyl. In certain embodiments, at least one Z is substituted C1-C6 alkyl. In certain embodiments, each Z is, independently, substituted C1-C6 alkyl. In certain embodiments, at least one Z is substituted methyl. In certain embodiments, each Z is substituted methyl. In certain embodiments, at least one Z is substituted ethyl. In certain embodiments, each Z is substituted ethyl.

[0205] In certain embodiments, at least one substituent group is C1-C6 alkoxy (e.g., at least one Z is C1-C6 alkyl substituted with one or more C1-C6 alkoxy). In another embodiment, each substituent group is, independently, C1-C6 alkoxy (e.g., each Z is, independently, C1-C6 alkyl substituted with one or more C1-C6 alkoxy).

[0206] In certain embodiments, at least one C1-C6 alkoxy substituent group is CH₃O— (e.g., at least one Z is CH₃OCH₂—). In another embodiment, each C1-C6 alkoxy substituent group is CH₃O— (e.g., each Z is CH₃OCH₂—).

[0207] In certain embodiments, at least one substituent group is halogen (e.g., at least one Z is C1-C6 alkyl substituted with one or more halogen). In certain embodiments, each substituent group is, independently, halogen (e.g., each Z is, independently, C1-C6 alkyl substituted with one or more halogen). In certain embodiments, at least one halogen substituent group is fluoro (e.g., at least one Z is CH₂FCH₂—, CHF₂CH₂—or CF₃CH₂—). In certain embodiments, each halo substituent group is fluoro (e.g., each Z is, independently, CH₂FCH₂—, CHF₂CH₂—or CF₃CH₂—).

[0208] In certain embodiments, at least one substituent group is hydroxyl (e.g., at least one Z is C1-C6 alkyl substituted with one or more hydroxyl). In certain embodiments, each substituent group is, independently, hydroxyl (e.g., each Z is, independently, C1-C6 alkyl substituted with one or more hydroxyl). In certain embodiments, at least one Z is HOCH₂—. In another embodiment, each Z is HOCH₂—.

[0209] In certain embodiments, at least one Z is CH₃—, CH₃CH₂—, CH₂OCH₃—, CH₂F or HOCH₂—. In certain embodiments, each Z is, independently, CH₃—, CH₃CH₂—, CH₂OCH₃—, CH₂F or HOCH₂—.

[0210] In certain embodiments, at least one Z group is C1-C6 alkyl substituted with one or more Xx, wherein each Xx is, independently, OJ1, NJ1J2, SJ1, N3, OC(═X)J1, OC(═X)NJ1J2, NJ3C(═X)NJ1J2 or CN; wherein each J1, J2 and J3 is, independently, H or C1-C6 alkyl, and X is O, S or NJ1. In another embodiment, at least one Z group is C1-C6 alkyl substituted with one or more Xx, wherein each Xx is, independently, halo (e.g., fluoro), hydroxyl, alkoxy (e.g., CH3O—) or azido.

[0211] In certain embodiments, each Z group is, independently, C1-C6 alkyl substituted with one or more Xx, wherein each Xx is independently OJ1, NJ1J2, SJ1, N3, OC(═X)J1, OC(═X)NJ1J2, NJ3C(═X)NJ1J2 or CN; wherein each J1, J2 and J3 is, independently, H or C1-C6 alkyl, and X is O, S or NJ1. In another embodiment, each Z group is, independently, C1-C6 alkyl substituted with one or more Xx, wherein each Xx is independently halo (e.g., fluoro), hydroxyl, alkoxy (e.g., CH3O—) or azido.

[0212] In certain embodiments, at least one Z group is CH₂Xx, wherein Xx is OJ1, NJ1J2, SJ1, N3, OC(═X)J1, OC(═X)NJ1J2, NJ3C(═X)NJ1J2 or CN; wherein each J1, J2 and J3 is, independently, H or C1-C6 alkyl, and X is O, S or NJ1 In certain embodiments, at least one Z group is CH₂Xx, wherein Xx is halo (e.g., fluoro), hydroxyl, alkoxy (e.g., CH₃O—) or azido.

[0213] In certain embodiments, each Z group is, independently, CH₂Xx, wherein each Xx is, independently, OJ1, NJ1J2, SJ1, N3, OC(═X)J1, OC(═X)NJ1J2, NJ3C(═X)NJ1J2 or CN; wherein each J1, J2 and J3 is, independently, H or C1-C6 alkyl, and X is O, S or NJ1. In another embodiment, each Z group is, independently, CH₂Xx, wherein each Xx is, independently, halo (e.g., fluoro), hydroxyl, alkoxy (e.g., CH₃O—) or azido.

[0214] In certain embodiments, at least one Z is CH₃—. In another embodiment, each Z is, CH₃—.

[0215] In certain embodiments, the Z group of at least one monomer is in the (R) configuration represented by the formula:

[chemical structure]

or the formula:

[chemical structure]

or the formula:

[chemical structure]

[0216] IN certain embodiments, the Z group of each monomer of the formula is in the (R)-configuration.

[0217] In certain embodiments, the Z group of at least one monomer is in the (S)-configuration represented by the formula:

[chemical structure]

or the formula:

[chemical structure]

or the formula:

[chemical structure]

[0218] In certain embodiments, the Z group of each monomer of the formula is in the (S)-configuration.

[0219] In certain embodiments, T3 is H or a hydroxyl protecting group. In certain embodiments, T4 is H or a hydroxyl protecting group. In a further embodiment T3 is an internucleoside linking group attached to a nucleoside, a nucleotide or a monomeric subunit. In certain embodiments, T4 is an internucleoside linking group attached to a nucleoside, a nucleotide or a monomeric subunit. In certain embodiments, T3 is an internucleoside linking group attached to an oligonucleoside or an oligonucleotide. In certain embodiments, T4 is an internucleoside linking group attached to an oligonucleoside or an oligonucleotide. In certain embodiments, T3 is an internucleoside linking group attached to an oligomeric compound. In certain embodiments, T4 is an internucleoside linking group attached to an oligomeric compound. In certain embodiments, at least one of T3 and T4 comprises an internucleoside linking group selected from phosphodiester or phosphorothioate.

[0220] In certain embodiments, oligomeric compounds have at least one region of at least two contiguous monomers of the formula:

[chemical structure]

or of the formula:

[chemical structure]

or of the formula:

[chemical structure]

[0221] In certain such embodiments, LNAs include, but are not limited to, (A) α-L-Methyleneoxy (4′-CH2-O-2′) LNA, (B) β-D-Methyleneoxy (4′-CH2-O-2′) LNA, (C) Ethyleneoxy (4′—(CH2)2-O-2′) LNA, (D) Aminooxy (4′-CH2-O—N(R)-2′) LNA and (E) Oxyamino (4′-CH2-N(R)—O-2′) LNA, as depicted below:

[chemical structure]

[0222] In certain embodiments, the oligomeric compound comprises at least two regions of at least two contiguous monomers of the above formula. In certain embodiments, the oligomeric compound comprises a gapped oligomeric compound. In certain embodiments, the oligomeric compound comprises at least one region of from about 8 to about 14 contiguous β-D-2′-deoxyribofuranosyl nucleosides. In certain embodiments, the oligomeric compound comprises at least one region of from about 9 to about 12 contiguous 3-D-2′-deoxyribofuranosyl nucleosides.

[0223] In certain embodiments, the oligomeric compound comprises at least one (e.g., 1, 2, 3, 4, 5, 6, 7, 8, 9, 10, 11, 12, 13, 14, 15 or more)S-cEt monomer of the formula:

[chemical structure]

wherein Bx IS heterocyclic base moiety.

[0224] In some embodiments, the oligomeric compound, e.g. REVERSIR compound, comprises at least one (e.g., 1, 2, 3, 4, 5, 6, 7, 8, 9, 10, 11, 12, 13, 14, 15 or more) nucleoside selected from the following:

[chemical structure]

[chemical structure]

[chemical structure]

[chemical structure]

[chemical structure]

where B is A-001 to A-026 and n is 0-6 (e.g., 0, 1, 2, 3, 4, 5 or 6).

[0225] In certain embodiments, monomers include sugar mimetics. In certain such embodiments, a mimetic is used in place of the sugar or sugar-internucleoside linkage combination, and the nucleobase is maintained for hybridization to a selected target. Representative examples of a sugar mimetics include, but are not limited to, cyclohexenyl or morpholino. Representative examples of a mimetic for a sugar-internucleoside linkage combination include, but are not limited to, peptide nucleic acids (PNA) and morpholino groups linked by uncharged achiral linkages. In some instances a mimetic is used in place of the nucleobase. Representative nucleobase mimetics are well known in the art and include, but are not limited to, tricyclic phenoxazine analogs and universal bases (Berger et al., Nuc Acid Res. 2000, 28:2911-14, incorporated herein by reference). Methods of synthesis of sugar, nucleoside and nucleobase mimetics are well known to those skilled in the art.

[0226] In certain embodiments, the REVERSIR compound comprises at least one monomer that is LNA and at least one G-clamp nucleobase. For example, the REVERSIR compound can comprise 1, 2, 3, 4, 5, 6, 7, 8, 9, 10, 11, 12, 13, 14, 15 or more monomers that are LNA 1, 2, 3, 4, 5, 6, 7, 8, 9, 10, 11, 12, 13, 14, 15 or more G-clamp nucleobases.

[0227] In some embodiments, the REVERSIR compound comprises at least one (e.g., 1, 2, 3, 4, 5, 6, 7, 8, 9, 10, 11, 12, 13, 14, 15 or more) peptide nucleic acid monomer. In certain embodiments, the REVERSIR compound comprises at least one monomer that is LNA and at least one monomer that is PNA. For example, the REVERSIR compound can comprise 1, 2, 3, 4, 5, 6, 7, 8, 9, 10, 11, 12, 13, 14, 15 or more monomers that are LNA 1, 2, 3, 4, 5, 6, 7, 8, 9, 10, 11, 12, 13, 14, 15 or more monomers that are PNA.

[0228] In certain embodiments, the REVERSIR compound comprises at least one PNA monomer and at least one G-clamp nucleobase. For example, the REVERSIR compound can comprise 1, 2, 3, 4, 5, 6, 7, 8, 9, 10, 11, 12, 13, 14, 15 or more PNA monomers and 1, 2, 3, 4, 5, 6, 7, 8, 9, 10, 11, 12, 13, 14, 15 or more G-clamp nucleobases.

[0229] In certain embodiments, the REVERSIR compound comprises at least one LNA monomer, at least one PNA monomer and at least one G-clamp nucleobase. For example, the REVERSIR compound can comprise 1, 2, 3, 4, 5, 6, 7, 8, 9, 10, 11, 12, 13, 14, 15 or more LNA monomers; 1, 2, 3, 4, 5, 6, 7, 8, 9, 10, 11, 12, 13, 14, 15 or more PNA monomers and 1, 2, 3, 4, 5, 6, 7, 8, 9, 10, 11, 12, 13, 14, 15 or more G-clamp nucleobases.

### Monomeric Linkages

[0230] Described herein are linking groups that link monomers (including, but not limited to, modified and unmodified nucleosides and nucleotides) together, thereby forming an oligomeric compound. Such linking groups are also referred to as intersugar linkage. The two main classes of linking groups are defined by the presence or absence of a phosphorus atom. Representative phosphorus containing linkages include, but are not limited to, phosphodiesters (P═O), phosphotriesters, methylphosphonates, phosphoramidate, and phosphorothioates (P═S). Representative non-phosphorus containing linking groups include, but are not limited to, methylenemethylimino (—CH2-N(CH3)—O—CH2—), thiodiester (—O—C(O)—S—), thionocarbamate (—O—C(O)(NH)—S—); siloxane (—O—Si(H)2-O—); and N,N′-dimethylhydrazine (—CH2-N(CH3)—N(CH3)—). Oligomeric compounds having non-phosphorus linking groups are referred to as oligonucleosides. Modified linkages, compared to natural phosphodiester linkages, can be used to alter, typically increase, nuclease resistance of the oligomeric compound. In certain embodiments, linkages having a chiral atom can be prepared a racemic mixtures, as separate enantiomers. Representative chiral linkages include, but are not limited to, alkylphosphonates and phosphorothioates. Methods of preparation of phosphorous-containing and non-phosphorous-containing linkages are well known to those skilled in the art.

[0231] The phosphate group in the linking group can be modified by replacing one of the oxygens with a different substituent. One result of this modification can be increased resistance of the oligonucleotide to nucleolytic breakdown. Examples of modified phosphate groups include phosphorothioate, phosphoroselenates, borano phosphates, borano phosphate esters, hydrogen phosphonates, phosphoroamidates, alkyl or aryl phosphonates and phosphotriesters. In some embodiments, one of the non-bridging phosphate oxygen atoms in the linkage can be replaced by any of the following: S, Se, BR₃ (R is hydrogen, alkyl, aryl), C (i.e. an alkyl group, an aryl group, etc . . . ), H, NR₂ (R is hydrogen, optionally substituted alkyl, aryl), or OR (R is optionally substituted alkyl or aryl). The phosphorous atom in an unmodified phosphate group is achiral. However, replacement of one of the non-bridging oxygens with one of the above atoms or groups of atoms renders the phosphorous atom chiral; in other words a phosphorous atom in a phosphate group modified in this way is a stereogenic center. The stereogenic phosphorous atom can possess either the “R” configuration (herein Rp) or the “S” configuration (herein Sp).

[0232] Phosphorodithioates have both non-bridging oxygens replaced by sulfur. The phosphorus center in the phosphorodithioates is achiral which precludes the formation of oligonucleotides diastereomers. Thus, while not wishing to be bound by theory, modifications to both non-bridging oxygens, which eliminate the chiral center, e.g. phosphorodithioate formation, can be desirable in that they cannot produce diastereomer mixtures. Thus, the non-bridging oxygens can be independently any one of O, S, Se, B, C, H, N, or OR (R is alkyl or aryl).

[0233] The phosphate linker can also be modified by replacement of bridging oxygen, (i.e. oxygen that links the phosphate to the sugar of the monomer), with nitrogen (bridged phosphoroamidates), sulfur (bridged phosphorothioates) and carbon (bridged methylenephosphonates). The replacement can occur at the either one of the linking oxygens or at both linking oxygens. When the bridging oxygen is the 3′-oxygen of a nucleoside, replacement with carbon is preferred. When the bridging oxygen is the 5′-oxygen of a nucleoside, replacement with nitrogen is preferred.

[0234] Modified phosphate linkages where at least one of the oxygen linked to the phosphate has been replaced or the phosphate group has been replaced by a non-phosphorous group, are also referred to as “non-phosphodiester intersugar linkage” or “non-phosphodiester linker.”

[0235] In certain embodiments, the phosphate group can be replaced by non-phosphorus containing connectors, e.g. dephospho linkers. Dephospho linkers are also referred to as non-phosphodiester linkers herein. While not wishing to be bound by theory, it is believed that since the charged phosphodiester group is the reaction center in nucleolytic degradation, its replacement with neutral structural mimics should impart enhanced nuclease stability. Again, while not wishing to be bound by theory, it can be desirable, in some embodiment, to introduce alterations in which the charged phosphate group is replaced by a neutral moiety.

[0236] Examples of moieties which can replace the phosphate group include, but are not limited to, amides (for example amide-3 (3′-CH₂—C(═O)—N(H)-5′) and amide-4 (3′-CH₂—N(H)—C(═O)-5′)), hydroxylamino, siloxane (dialkylsiloxxane), carboxamide, carbonate, carboxymethyl, carbamate, carboxylate ester, thioether, ethylene oxide linker, sulfide, sulfonate, sulfonamide, sulfonate ester, thioformacetal (3′-S—CH₂—O-5′), formacetyl (3′-O—CH₂—O-5′), oxime, methyleneimino, methylenecarbonylamino, methylenemethylimino (MMI, 3′-CH₂—N(CH₃)—O-5′), methylenehydrazono, methylenedimethylhydrazo, methyleneoxymethylimino, ethers (C3′—O—C5′), thioethers (C3′—S—C5′), thioacetamido (C3′—N(H)—C(═O)—CH₂—S—C5′, C3′—O—P(O)—O—SS—C5′, C3′—CH₂—NH—NH—C5′, 3′—NHP(O)(OCH₃)—O-5′ and 3′-NHP(O)(OCH₃)—O-5′ and nonionic linkages containing mixed N, O, S and CH₂ component parts. See for example, Carbohydrate Modifications in Antisense Research; Y. S. Sanghvi and P. D. Cook Eds. ACS Symposium Series 580; Chapters 3 and 4, (pp. 40-65). Preferred embodiments include methylenemethylimino (MMI), methylenecarbonylamino, amides, carbamate and ethylene oxide linker.

[0237] One skilled in the art is well aware that in certain instances replacement of a non-bridging oxygen can lead to enhanced cleavage of the intersugar linkage by the neighboring 2′-OH, thus in many instances, a modification of a non-bridging oxygen can necessitate modification of 2′-OH, e.g., a modification that does not participate in cleavage of the neighboring intersugar linkage, e.g., arabinose sugar, 2′-O-alkyl, 2′-F, LNA and ENA.

[0238] Preferred non-phosphodiester intersugar linkages include phosphorothioates, phosphorothioates with an at least 1%, 5%, 10%, 20%, 30%, 40%, 50%, 60%, 70%, 80%, 90% 95% or more enantiomeric excess of Sp isomer, phosphorothioates with an at least 1%, 5%, 10%, 20%, 30%, 40%, 50%, 60%, 70%, 80%, 90% 95% or more enantiomeric excess of Rp isomer, phosphorodithioates, phosphotriesters, aminoalkylphosphotriesters, alkyl-phosphonaters (e.g., methyl-phosphonate), selenophosphates, phosphoramidates (e.g., N-alkylphosphoramidate), and boranophosphates.

[0239] In some embodiments, the oligomeric compound, e.g., REVERSIR compound or siRNA, comprises at least one (e.g., 1, 2, 3, 4, 5, 6, 7, 8, 9, 10, 11, 12, 13, 14, 15 or more and up to including all) modified or nonphosphodiester linkages. In one embodiment, the oligomeric compound, e.g., REVERSIR compound or siRNA, comprises at least one (e.g., 1, 2, 3, 4, 5, 6, 7, 8, 9, 10, 11, 12, 13, 14, 15 or more and up to including all) phosphorothioate linkages.

[0240] In some embodiments, all internucleoside linkages in the reverser compounds are phosphorothioate (PS) internucleoside linkages. In certain embodiments, the REVERSIR compounds comprise at least one phosphorothioate (PS) internucleoside linkage, but not all internucleoside linkages in said REVERSIR compound are a phosphorothioate linkage. In other words, in some embodiments, less than 100% (e.g., 95%, 90%, 85%, 80%, 75%, 70%, 65%, 60%, 55%, 50%, 45%, 40% or fewer) of the internucleoside linkages are phosphorothioate linkages.

[0241] In some embodiments, the REVERSIR compounds comprise at least one phosphorothioate internucleoside linkage and at least one internucleoside linkage that is not a phosphorothioate. For example, the REVERSIR compounds comprise at least one phosphorothioate internucleoside linkage and at least one phosphodiester internucleoside linkage. In some embodiments, the non-phosphorothioate internucleoside linkage is between the terminus and the penultimate nucleosides.

[0242] In some embodiments, the internucleoside linkage between the nucleobase at the 3′-terminus of the REVERSIR compound and the rest of the REVERSIR compound is a phosphodiester linkage. In some embodiments, all internucleoside linkages in the reverser compounds are phosphorothioate except for the internucleoside linkage between the nucleoside at the 3′-terminus of the REVERSIR compound and the rest of the REVERSIR compound.

[0243] Oligomeric compounds can also be constructed wherein the phosphate linker and the sugar are replaced by nuclease resistant nucleoside or nucleotide surrogates. While not wishing to be bound by theory, it is believed that the absence of a repetitively charged backbone diminishes binding to proteins that recognize polyanions (e.g. nucleases). Again, while not wishing to be bound by theory, it can be desirable in some embodiment, to introduce alterations in which the bases are tethered by a neutral surrogate backbone. Examples include the morpholino, cyclobutyl, pyrrolidine, peptide nucleic acid (PNA), aminoethylglycyl PNA (aegPNA) and backnone-extended pyrrolidine PNA (bepPNA) nucleoside surrogates. A preferred surrogate is a PNA surrogate.

[0244] The oligomeric compounds described herein contain one or more asymmetric centers and thus give rise to enantiomers, diastereomers, and other stereoisomeric configurations that may be defined, in terms of absolute stereochemistry, as (R) or (S), such as for sugar anomers, or as (D) or (L) such as for amino acids et al. Included in the antisense compounds provided herein are all such possible isomers, as well as their racemic and optically pure forms.

### Terminal Modifications

[0245] Ends of the oligomeric compound can be modified. Such modifications can be at one end or both ends. For example, the 3′ and/or 5′ ends of an oligonucleotide can be conjugated to other functional molecular entities such as labeling moieties, e.g., fluorophores (e.g., pyrene, TAMRA, fluorescein, Cy3 or Cy5 dyes) or protecting groups (based e.g., on sulfur, silicon, boron or ester). The functional molecular entities can be attached to the sugar through a phosphate group and/or a linker. The terminal atom of the linker can connect to or replace the linking atom of the phosphate group or the C-3′ or C-5′ O, N, S or C group of the sugar. Alternatively, the linker can connect to or replace the terminal atom of a nucleotide surrogate (e.g., PNAs).

[0246] When a linker/phosphate-functional molecular entity-linker/phosphate array is interposed between two strands of a double stranded oligomeric compound, this array can substitute for a hairpin loop in a hairpin-type oligomeric compound.

[0247] Terminal modifications useful for modulating activity include modification of the 5′ end of oligomeric compound with phosphate or phosphate analogs. In certain embodiments, the 5′end of oligomeric compound is phosphorylated or includes a phosphoryl analog. Exemplary 5′-phosphate modifications include those which are compatible with RISC mediated gene silencing. Modifications at the 5′-terminal end can also be useful in stimulating or inhibiting the immune system of a subject. In some embodiments, the 5′-end of the oligomeric compound comprises the modification

[chemical structure]

wherein W, X and Y are each independently selected from the group consisting of O, OR (R is hydrogen, alkyl, aryl), S, Se, BR₃ (R is hydrogen, alkyl, aryl), BH₃⁻, C (i.e. an alkyl group, an aryl group, etc . . . ), H, NR₂ (R is hydrogen, alkyl, aryl), or OR (R is hydrogen, alkyl or aryl); A and Z are each independently for each occurrence absent, O, S, CH₂, NR (R is hydrogen, alkyl, aryl), or optionally substituted alkylene, wherein backbone of the alkylene can comprise one or more of O, S, SS and NR (R is hydrogen, alkyl, aryl) internally and/or at the end; and n is 0-2. In some embodiments, n is 1 or 2. It is understood that A is replacing the oxygen linked to 5′ carbon of sugar. When n is 0, W and Y together with the P to which they are attached can form an optionally substituted 5-8 membered heterocyclic, wherein W an Y are each independently O, S, NR′ or alkylene. Preferably the heterocyclic is substituted with an aryl or heteroaryl. In some embodiments, one or both hydrogen on C5′ of the 5′—terminal nucleotides are replaced with a halogen, e.g., F.

[0248] Exemplary 5′-modifications include, but are not limited to, 5′-monophosphate ((HO)₂(O)P—O-5′); 5′-diphosphate ((HO)₂(O)P—O—P(HO)(O)—O-5′); 5′-triphosphate ((HO)₂(O)P—O—(HO)(O)P—O—P(HO)(O)—O-5′); 5′-monothiophosphate (phosphorothioate; (HO)₂(S)P—O-5′); 5′-monodithiophosphate (phosphorodithioate; (HO)(HS)(S)P—O-5′), 5′-phosphorothiolate ((HO)₂(O)P—S-5′); 5′-alpha-thiotriphosphate; 5′-beta-thiotriphosphate; 5′-gamma-thiotriphosphate; 5′-phosphoramidates ((HO)₂(O)P—NH-5′, (HO)(NH₂)(O)P—O-5′). Other 5′-modification include 5′-alkylphosphonates (R(OH)(O)P—O-5′, R=alkyl, e.g., methyl, ethyl, isopropyl, propyl, etc . . . ), 5′-alkyletherphosphonates (R(OH)(O)P—O-5′, R=alkylether, e.g., methoxymethyl (CH₂OMe), ethoxymethyl, etc . . . ). Other exemplary 5′-modifications include where Z is optionally substituted alkyl at least once, e.g., ((HO)2(X)P—O[—(CH₂)ₐ—O—P(X)(OH)—O]_{b}—5′, ((HO)₂(X)P—O[—(CH₂)ₐ—P(X)(OH)—O]_{b}—5′, ((HO)₂(X)P—[—(CH₂)ₐ—O—P(X)(OH)—O]_{b}—5′; dialkyl terminal phosphates and phosphate mimics: HO[—(CH₂)ₐ—O—P(X)(OH)—O]_{b}—5′, H2N[—(CH₂)ₐ—O—P(X)(OH)—O]_{b}—5′, H[—(CH₂)ₐ—O—P(X)(OH)—O]_{b}—5′, Me₂N[—(CH₂)ₐ—O—P(X)(OH)—O]_{b}—5′, HO[—(CH₂)ₐ—P(X)(OH)—O]_{b}—5′, H2N[—(CH₂)ₐ—P(X)(OH)—O]_{b}—5′, H[—(CH₂)ₐ—P(X)(OH)—O]_{b}—5′, Me₂N[—(CH₂)ₐ—P(X)(OH)—O]_{b}—5′, wherein a and b are each independently 1-10. Other embodiments, include replacement of oxygen and/or sulfur with BH₃, BH₃⁻ and/or Se.

[0249] Terminal modifications can also be useful for monitoring distribution, and in such cases the preferred groups to be added include fluorophores, e.g., fluorescein or an Alexa dye, e.g., Alexa 488. Terminal modifications can also be useful for enhancing uptake, useful modifications for this include targeting ligands. Terminal modifications can also be useful for cross-linking an oligonucleotide to another moiety; modifications useful for this include mitomycin C, psoralen, and derivatives thereof.

### Oligomeric Compounds

[0250] In certain embodiments, provided herein are oligomeric compounds having reactive phosphorus groups useful for forming linkages including for example phosphodiester and phosphorothioate internucleoside linkages. Methods of preparation and/or purification of precursors or oligomeric compounds are not a limitation of the compositions or methods provided herein. Methods for synthesis and purification of oligomeric compounds including DNA, RNA, oligonucleotides, oligonucleosides, and antisense compounds are well known to those skilled in the art.

[0251] Generally, oligomeric compounds comprise a plurality of monomeric subunits linked together by linking groups. Non-limiting examples of oligomeric compounds include primers, probes, antisense compounds, antisense oligonucleotides, external guide sequence (EGS) oligonucleotides, alternate splicers, and siRNAs. As such, these compounds can be introduced in the form of single-stranded, double-stranded, circular, branched or hairpins and can contain structural elements such as internal or terminal bulges or loops. Oligomeric double-stranded compounds can be two strands hybridized to form double-stranded compounds or a single strand with sufficient self-complementarity to allow for hybridization and formation of a fully or partially double-stranded compound.

[0252] In certain embodiments, the present invention provides chimeric oligomeric compounds. In certain such embodiments, chimeric oligomeric compounds are chimeric oligonucleotides. In certain such embodiments, the chimeric oligonucleotides comprise differently modified nucleotides. In certain embodiments, chimeric oligonucleotides are mixed-backbone antisense oligonucleotides.

[0253] In general a chimeric oligomeric compound will have modified nucleosides that can be in isolated positions or grouped together in regions that will define a particular motif. Any combination of modifications and/or mimetic groups can comprise a chimeric oligomeric compound as described herein.

[0254] In certain embodiments, chimeric oligomeric compounds typically comprise at least one region modified so as to confer increased resistance to nuclease degradation, increased cellular uptake, and/or increased binding affinity for the target nucleic acid. In certain embodiments, an additional region of the oligomeric compound may serve as a substrate for enzymes capable of cleaving RNA:DNA or RNA:RNA hybrids.

[0255] In certain embodiments, chimeric oligomeric compounds are gapmers. In certain such embodiments, a mixed-backbone oligomeric compound has one type of internucleotide linkages in one or both wings and a different type of internucleoside linkages in the gap. In certain such embodiments, the mixed-backbone oligonucleotide has phosphodiester linkages in the wings and phosphorothioate linkages in the gap. In certain embodiments in which the internucleoside linkages in a wing is different from the internucleoside linkages in the gap, the internucleoside linkage bridging that wing and the gap is the same as the internucleoside linkage in the wing. In certain embodiments in which the internucleoside linkages in a wing is different from the internucleoside linkages in the gap, the internucleoside linkage bridging that wing and the gap is the same as the internucleoside linkage in the gap.

[0256] In certain embodiments, the present invention provides oligomeric compounds, including siRNAs and REVERSIR compounds of any of a variety of ranges of lengths. In certain embodiments, the invention provides oligomeric compounds consisting of X—Y linked oligonucleosides, where X and Y are each independently selected from 8, 9, 10, 11, 12, 13, 14, 15, 16, 17, 18, 19, 20, 21, 22, 23, 24, 25, 26, 27, 28, 29, 30, 31, 32, 33, 34, 35, 36, 37, 38, 39, 40, 41, 42, 43, 44, 45, 46, 47, 48, 49, and 50; provided that X<Y. For example, in certain embodiments, the invention provides oligomeric compounds comprising: 8-9, 8-10, 8-11, 8-12, 8-13, 8-14, 8-15, 8-16, 8-17, 8-18, 8-19, 8-20, 8-21, 8-22, 8-23, 8-24, 8-25, 8-26, 8-27, 8-28, 8-29, 8-30, 9-10, 9-11, 9-12, 9-13, 9-14, 9-15, 9-16, 9-17, 9-18, 9-19, 9-20, 9-21, 9-22, 9-23, 9-24, 9-25, 9-26, 9-27, 9-28, 9-29, 9-30, 10-11, 10-12, 10-13, 10-14, 10-15, 10-16, 10-17, 10-18, 10-19, 10-20, 10-21, 10-22, 10-23, 10-24, 10-25, 10-26, 10-27, 10-28, 10-29, 10-30, 11-12, 11-13, 11-14, 11-15, 11-16, 11-17, 11-18, 11-19, 11-20, 11-21, 11-22, 11-23, 11-24, 11-25, 11-26, 11-27, 11-28, 11-29, 11-30, 12-13, 12-14, 12-15, 12-16, 12-17, 12-18, 12-19, 12-20, 12-21, 12-22, 12-23, 12-24, 12-25, 12-26, 12-27, 12-28, 12-29, 12-30, 13-14, 13-15, 13-16, 13-17, 13-18, 13-19, 13-20, 13-21, 13-22, 13-23, 13-24, 13-25, 13-26, 13-27, 13-28, 13-29, 13-30, 14-15, 14-16, 14-17, 14-18, 14-19, 14-20, 14-21, 14-22, 14-23, 14-24, 14-25, 14-26, 14-27, 14-28, 14-29, 14-30, 15-16, 15-17, 15-18, 15-19, 15-20, 15-21, 15-22, 15-23, 15-24, 15-25, 15-26, 15-27, 15-28, 15-29, 15-30, 16-17, 16-18, 16-19, 16-25, 16-21, 16-22, 16-23, 16-24, 16-25, 16-26, 16-27, 16-28, 16-29, 16-30, 17-18, 17-19, 17-20, 17-21, 17-22, 17-23, 17-24, 17-25, 17-26, 17-27, 17-28, 17-29, 17-30, 18-19, 18-20, 18-21, 18-22, 18-23, 18-24, 18-25, 18-26, 18-27, 18-28, 18-29, 18-30, 19-20, 19-21, 19-22, 19-23, 19-24, 19-25, 19-26, 19-29, 19-28, 19-29, 19-30, 20-21, 20-22, 20-23, 20-24, 20-25, 20-26, 20-27, 20-28, 20-29, 20-30, 21-22, 21-23, 21-24, 21-25, 21-26, 21-27, 21-28, 21-29, 21-30, 22-23, 22-24, 22-25, 22-26, 22-27, 22-28, 22-29, 22-30, 23-24, 23-25, 23-26, 23-27, 23-28, 23-29, 23-30, 24-25, 24-26, 24-27, 24-28, 24-29, 24-30, 25-26, 25-27, 25-28, 25-29, 25-30, 26-27, 26-28, 26-29, 26-30, 27-28, 27-29, 27-30, 28-29, 28-30, or 29-30 linked nucleosides.

[0257] As noted-above, REVERSIR compounds can be of any length. For example, in some embodiments, the REVERSIR compound is a modified oligonucleotide consisting of 6-30 nucleotides. For example, the REVERSIR compound can consist of 6, 7, 8, 9, 10, 11, 12, 13, 14, 15, 16, 17, 18, 19, 20, 21, 22, 23, 24, 25, 26, 27, 28, 29 or 30 linked nucleobases. In some embodiments, the REVERSIR compound consists of 6-17, 7-16 or 8-15 linked nucleobases.

[0258] The inventors have discovered inter alia that REVERSIR compounds, i.e., modified oligonucleotides, consisting of 15 or fewer nucleosides are particularly effective in reversing the siRNA activity. Accordingly, in some embodiments, the REVERSIR compound is a modified oligonucleotide consisting of 8-15 (e.g., 8, 9, 10, 11, 12, 13, 14 or 15) linked nucleosides. In some embodiments, the REVERSIR compound is a modified oligonucleotide consisting of 6-12, 7-11 or 8-10 linked nucleobases. In some embodiments, the REVERSIR compound consists of 8-9 linked nucleobases.

[0259] As discussed herein, REVERSIR compounds are modified oligonucleotides that are substantially complementary to at least one strand of an siRNA. Now without wishing to be bound by a theory, REVERSIR compounds that are substantially complementary to the seed region of the antisense strand of the siRNA (i.e., at positions 2-8 of the 5′-end of the antisense strand) are particularly effective in reducing siRNA activity. Thus, in many embodiments, the REVERSIR compound is substantially complementary to nucleosides 2-8, 2-9, 2-10, 2-11, 2-12, 2-13, 2-14, 2-15 or 2-16 of the antisense strand of the siRNA. By substantially complementary in this context is meant a complementarity of at least 90%, preferably at least 95%, and more preferably complete complementarity.

### Ligands

[0260] In certain embodiments, oligomeric compounds are modified by covalent attachment of one or more conjugate groups. In general, conjugate groups modify one or more properties of the attached oligomeric compound including but not limited to pharmacodynamic, pharmacokinetic, binding, absorption, cellular distribution, cellular uptake, charge and clearance. Conjugate groups are routinely used in the chemical arts and are linked directly or via an optional linking moiety or linking group to a parent compound such as an oligomeric compound. A preferred list of conjugate groups includes without limitation, intercalators, reporter molecules, polyamines, polyamides, polyethylene glycols, thioethers, polyethers, cholesterols, thiocholesterols, cholic acid moieties, folate, lipids, phospholipids, biotin, phenazine, phenanthridine, anthraquinone, adamantane, acridine, fluoresceins, rhodamines, coumarins and dyes.

[0261] Preferred conjugate groups amenable to the present invention include lipid moieties such as a cholesterol moiety (Letsinger et al., Proc. Natl. Acad. Sci. USA, 1989, 86, 6553); cholic acid (Manoharan et al., Bioorg. Med. Chem. Lett., 1994, 4, 1053); a thioether, e.g., hexyl-S-tritylthiol (Manoharan et al., Ann. N.Y. Acad. Sci., 1992, 660, 306; Manoharan et al., Bioorg. Med. Chem. Let., 1993, 3, 2765); a thiocholesterol (Oberhauser et al., Nucl. Acids Res., 1992, 20, 533); an aliphatic chain, e.g., dodecandiol or undecyl residues (Saison-Behmoaras et al., EMBO J., 1991, 10, 111; Kabanov et al., FEBS Lett., 1990, 259, 327; Svinarchuk et al., Biochimie, 1993, 75, 49); a phospholipid, e.g., di-hexadecyl-rac-glycerol or triethylammonium-1,2-di-O-hexadecyl-rac-glycero-3-H-phosphonate (Manoharan et al., Tetrahedron Lett., 1995, 36, 3651; Shea et al., Nucl. Acids Res., 1990, 18, 3777); a polyamine or a polyethylene glycol chain (Manoharan et al., Nucleosides & Nucleotides, 1995, 14, 969); adamantane acetic acid (Manoharan et al., Tetrahedron Lett., 1995, 36, 3651); a palmityl moiety (Mishra et al., Biochim. Biophys. Acta, 1995, 1264, 229); or an octadecylamine or hexylamino-carbonyl-oxycholesterol moiety (Crooke et al., J. Pharmacol. Exp. Ther., 1996, 277, 923).

[0262] Generally, a wide variety of entities, e.g., ligands, can be coupled to the oligomeric compounds described herein. Ligands can include naturally occurring molecules, or recombinant or synthetic molecules. Exemplary ligands include, but are not limited to, polylysine (PLL), poly L-aspartic acid, poly L-glutamic acid, styrene-maleic acid anhydride copolymer, poly(L-lactide-co-glycolied) copolymer, divinyl ether-maleic anhydride copolymer, N-(2-hydroxypropyl)methacrylamide copolymer (HMPA), polyethylene glycol (PEG, e.g., PEG-2K, PEG-5K, PEG-10K, PEG-12K, PEG-15K, PEG-20K, PEG-40K), MPEG, [MPEG]2, polyvinyl alcohol (PVA), polyurethane, poly(2-ethylacryllic acid), N-isopropylacrylamide polymers, polyphosphazene, polyethylenimine, cationic groups, spermine, spermidine, polyamine, pseudopeptide-polyamine, peptidomimetic polyamine, dendrimer polyamine, arginine, amidine, protamine, cationic lipid, cationic porphyrin, quaternary salt of a polyamine, thyrotropin, melanotropin, lectin, glycoprotein, surfactant protein A, mucin, glycosylated polyaminoacids, transferrin, bisphosphonate, polyglutamate, polyaspartate, aptamer, asialofetuin, hyaluronan, procollagen, immunoglobulins (e.g., antibodies), insulin, transferrin, albumin, sugar-albumin conjugates, intercalating agents (e.g., acridines), cross-linkers (e.g. psoralen, mitomycin C), porphyrins (e.g., TPPC4, texaphyrin, Sapphyrin), polycyclic aromatic hydrocarbons (e.g., phenazine, dihydrophenazine), artificial endonucleases (e.g., EDTA), lipophilic molecules (e.g., steroids, bile acids, cholesterol, cholic acid, adamantane acetic acid, 1-pyrene butyric acid, dihydrotestosterone, 1,3-Bis-O(hexadecyl)glycerol, geranyloxyhexyl group, hexadecylglycerol, borneol, menthol, 1,3-propanediol, heptadecyl group, palmitic acid, myristic acid, O3-(oleoyl)lithocholic acid, O3-(oleoyl)cholenic acid, dimethoxytrityl, or phenoxazine), peptides (e.g., an alpha helical peptide, amphipathic peptide, RGD peptide, cell permeation peptide, endosomolytic/fusogenic peptide), alkylating agents, phosphate, amino, mercapto, polyamino, alkyl, substituted alkyl, radiolabeled markers, enzymes, haptens (e.g. biotin), transport/absorption facilitators (e.g., naproxen, aspirin, vitamin E, folic acid), synthetic ribonucleases (e.g., imidazole, bisimidazole, histamine, imidazole clusters, acridine-imidazole conjugates, Eu3+ complexes of tetraazamacrocycles), dinitrophenyl, HRP, AP, antibodies, hormones and hormone receptors, lectins, carbohydrates, multivalent carbohydrates, vitamins (e.g., vitamin A, vitamin E, vitamin K, vitamin B, e.g., folic acid, B12, riboflavin, biotin and pyridoxal), vitamin cofactors, lipopolysaccharide, an activator of p38 MAP kinase, an activator of NF-κB, taxon, vincristine, vinblastine, cytochalasin, nocodazole, japlakinolide, latrunculin A, phalloidin, swinholide A, indanocine, myoservin, tumor necrosis factor alpha (TNFalpha), interleukin-1 beta, gamma interferon, natural or recombinant low density lipoprotein (LDL), natural or recombinant high-density lipoprotein (HDL), and a cell-permeation agent (e.g., a.helical cell-permeation agent).

[0263] Peptide and peptidomimetic ligands include those having naturally occurring or modified peptides, e.g., D or L peptides; α, β, or γ peptides; N-methyl peptides; azapeptides; peptides having one or more amide, i.e., peptide, linkages replaced with one or more urea, thiourea, carbamate, or sulfonyl urea linkages; or cyclic peptides. A peptidomimetic (also referred to herein as an oligopeptidomimetic) is a molecule capable of folding into a defined three-dimensional structure similar to a natural peptide. The peptide or peptidomimetic ligand can be about 5-50 amino acids long, e.g., about 5, 10, 15, 20, 25, 30, 35, 40, 45, or 50 amino acids long.

[0264] Exemplary amphipathic peptides include, but are not limited to, cecropins, lycotoxins, paradaxins, buforin, CPF, bombinin-like peptide (BLP), cathelicidins, ceratotoxins, S. clava peptides, hagfish intestinal antimicrobial peptides (HFIAPs), magainines, brevinins-2, dermaseptins, melittins, pleurocidin, H₂A peptides, Xenopus peptides, esculentinis-1, and caerins.

[0265] As used herein, the term “endosomolytic ligand” refers to molecules having endosomolytic properties. Endosomolytic ligands promote the lysis of and/or transport of the composition of the invention, or its components, from the cellular compartments such as the endosome, lysosome, endoplasmic reticulum (ER), golgi apparatus, microtubule, peroxisome, or other vesicular bodies within the cell, to the cytoplasm of the cell. Some exemplary endosomolytic ligands include, but are not limited to, imidazoles, poly or oligoimidazoles, linear or branched polyethyleneimines (PEIs), linear and brached polyamines, e.g. spermine, cationic linear and branched polyamines, polycarboxylates, polycations, masked oligo or poly cations or anions, acetals, polyacetals, ketals/polyketals, orthoesters, linear or branched polymers with masked or unmasked cationic or anionic charges, dendrimers with masked or unmasked cationic or anionic charges, polyanionic peptides, polyanionic peptidomimetics, pH-sensitive peptides, natural and synthetic fusogenic lipids, natural and synthetic cationic lipids.

[0266] Exemplary endosomolytic/fusogenic peptides include, but are not limited to, AALEALAEALEALAEALEALAEAAAAGGC (GALA); AALAEALAEALAEALAEALAEALAAAAGGC (EALA); ALEALAEALEALAEA; GLFEAIEGFIENGWEGMIWDYG (INF-7); GLFGAIAGFIENGWEGMIDGWYG (Inf HA-2); GLFEAIEGFIENGWEGMIDGWYGCGLFEAIEGFIENGWEGMID GWYGC (diINF-7); GLFEAIEGFIENGWEGMIDGGCGLFEAIEGFIENGWEGMIDGGC (diINF-3); GLFGALAEALAEALAEHLAEALAEALEALAAGGSC (GLF); GLFEAIEGFIENGWEGLAEALAEALEALAAGGSC (GALA-INF3); GLF EAI EGFI ENGW EGnI DG K GLF EAI EGFI ENGW EGnI DG (INF-5, n is norleucine); LFEALLELLESLWELLLEA (JTS-1); GLFKALLKLLKSLWKLLLKA (ppTG1); GLFRALLRLLRSLWRLLLRA (ppTG20); WEAKLAKALAKALAKHLAKALAKALKACEA (KALA); GLFFEAIAEFIEGGWEGLIEGC (HA); GIGAVLKVLTTGLPALISWIKRKRQQ (Melittin); H₅WYG; and CHK₆HC.

[0267] Without wishing to be bound by theory, fusogenic lipids fuse with and consequently destabilize a membrane. Fusogenic lipids usually have small head groups and unsaturated acyl chains. Exemplary fusogenic lipids include, but are not limited to, 1,2-dileoyl-sn-3-phosphoethanolamine (DOPE), phosphatidylethanolamine (POPE), palmitoyloleoylphosphatidylcholine (POPC), (6Z,9Z,28Z,31Z)-heptatriaconta-6,9,28,31-tetraen-19-ol (Di-Lin), N-methyl(2,2-di((9Z,12Z)-octadeca-9,12-dienyl)-1,3-dioxolan-4-yl)methanamine (DLin-k-DMA) and N-methyl-2-(2,2-di((9Z,12Z)-octadeca-9,12-dienyl)-1,3-dioxolan-4-yl)ethanamine (also referred to as XTC herein).

[0268] Synthetic polymers with endosomolytic activity amenable to the present invention are described in U.S. Pat. App. Pub. Nos. 2009/0048410; 2009/0023890; 2008/0287630; 2008/0287628; 2008/0281044; 2008/0281041; 2008/0269450; 2007/0105804; 20070036865; and 2004/0198687, contents of which are hereby incorporated by reference in their entirety.

[0269] Exemplary cell permeation peptides include, but are not limited to, RQIKIWFQNRRMKWKK (penetratin); GRKKRRQRRRPPQC (Tat fragment 48-60); GALFLGWLGAAGSTMGAWSQPKKKRKV (signal sequence based peptide); LLIILRRRIRKQAHAHSK (PVEC); GWTLNSAGYLLKINLKALAALAKKIL (transportan); KLALKLALKALKAALKLA (amphiphilic model peptide); RRRRRRRRR (Arg9); KFFKFFKFFK (Bacterial cell wall permeating peptide); LLGDFFRKSKEKIGKEFKRIVQRIKDFLRNLVPRTES (LL-37); SWLSKTAKKLENSAKKRISEGIAIAIQGGPR (cecropin P1); ACYCRIPACIAGERRYGTCIYQGRLWAFCC (α-defensin); DHYNCVSSGGQCLYSACPIFTKIQGTCYRGKAKCCK (β-defensin); RRRPRPPYLPRPRPPPFFPPRLPPRIPPGFPPRFPPRFPGKR-NH2 (PR-39); ILPWKWPWWPWRR-NH2 (indolicidin); AAVALLPAVLLALLAP (RFGF); AALLPVLLAAP (RFGF analogue); and RKCRIVVIRVCR (bactenecin).

[0270] Exemplary cationic groups include, but are not limited to, protonated amino groups, derived from e.g., O-AMINE (AMINE=NH₂; alkylamino, dialkylamino, heterocyclyl, arylamino, diaryl amino, heteroaryl amino, or diheteroaryl amino, ethylene diamine, polyamino); aminoalkoxy, e.g., O(CH₂)ₙAMINE, (e.g., AMINE=NH₂; alkylamino, dialkylamino, heterocyclyl, arylamino, diaryl amino, heteroaryl amino, or diheteroaryl amino, ethylene diamine, polyamino); amino (e.g. NH₂; alkylamino, dialkylamino, heterocyclyl, arylamino, diaryl amino, heteroaryl amino, diheteroaryl amino, or amino acid); and NH(CH₂CH₂NH)ₙCH₂CH₂-AMINE (AMINE=NH₂; alkylamino, dialkylamino, heterocyclyl, arylamino, diaryl amino, heteroaryl amino, or diheteroaryl amino).

[0271] As used herein the term “targeting ligand” refers to any molecule that provides an enhanced affinity for a selected target, e.g., a cell, cell type, tissue, organ, region of the body, or a compartment, e.g., a cellular, tissue or organ compartment. Some exemplary targeting ligands include, but are not limited to, antibodies, antigens, folates, receptor ligands, carbohydrates, aptamers, integrin receptor ligands, chemokine receptor ligands, transferrin, biotin, serotonin receptor ligands, PSMA, endothelin, GCPII, somatostatin, LDL and HDL ligands.

[0272] Carbohydrate based targeting ligands include, but are not limited to, D-galactose, multivalent galactose, N-acetyl-D-galactose (GalNAc), multivalent GalNAc, e.g. GalNAc2 and GalNAc3; D-mannose, multivalent mannose, multivalent lactose, N-acetyl-galactosamine, N-acetyl-glucosamine, multivalent fucose, glycosylated polyaminoacids and lectins. The term multivalent indicates that more than one monosaccharide unit is present. Such monosaccharide subunits can be linked to each other through glycosidic linkages or linked to a scaffold molecule.

[0273] A number of folate and folate analogs amenable to the present invention as ligands are described in U.S. Pat. Nos. 2,816,110; 51,410,104; 5,552,545; 6,335,434 and 7,128,893, contents of which are herein incorporated in their entireties by reference.

[0274] As used herein, the terms “PK modulating ligand” and “PK modulator” refers to molecules which can modulate the pharmacokinetics of the composition of the invention. Some exemplary PK modulator include, but are not limited to, lipophilic molecules, bile acids, sterols, phospholipid analogues, peptides, protein binding agents, vitamins, fatty acids, phenoxazine, aspirin, naproxen, ibuprofen, suprofen, ketoprofen, (S)-(+)-pranoprofen, carprofen, PEGs, biotin, and transthyretia-binding ligands (e.g., tetraiidothyroacetic acid, 2, 4, 6-triiodophenol and flufenamic acid). Oligomeric compounds that comprise a number of phosphorothioate intersugar linkages are also known to bind to serum protein, thus short oligomeric compounds, e.g. oligonucleotides of comprising from about 5 to 30 nucleotides (e.g., 5 to 25 nucleotides, preferably 5 to 20 nucleotides, e.g., 5, 6, 7, 8, 9, 10, 11, 12, 13, 14, 15, 16, 17, 18, 19, or 20 nucleotides), and that comprise a plurality of phosphorothioate linkages in the backbone are also amenable to the present invention as ligands (e.g. as PK modulating ligands). The PK modulating oligonucleotide can comprise at least 3, 4, 5, 6, 7, 8, 9, 10, 11, 12, 13, 14, 15 or more phosphorothioate and/or phosphorodithioate linkages. In some embodiments, all internucleotide linkages in PK modulating oligonucleotide are phosphorothioate and/or phosphorodithioates linkages. In addition, aptamers that bind serum components (e.g. serum proteins) are also amenable to the present invention as PK modulating ligands. Binding to serum components (e.g. serum proteins) can be predicted from albumin binding assays, such as those described in Oravcova, et al., Journal of Chromatography B (1996), 677: 1-27.

[0275] When two or more ligands are present, the ligands can all have same properties, all have different properties or some ligands have the same properties while others have different properties. For example, a ligand can have targeting properties, have endosomolytic activity or have PK modulating properties. In a preferred embodiment, all the ligands have different properties.

[0276] In some embodiments, ligand on one strand of a double-stranded oligomeric compound has affinity for a ligand on the second strand. In some embodiments, a ligand is covalently linked to both strands of a double-stranded oligomeric compound. As used herein, when a ligand is linked to more than oligomeric strand, point of attachment for an oligomeric compound can be an atom of the ligand self or an atom on a carrier molecule to which the ligand itself is attached.

[0277] Ligands can be coupled to the oligomeric compounds at various places, for example, 3′-end, 5′-end, and/or at an internal position. When two or more ligands are present, the ligand can be on opposite ends of an oligomeric compound. In preferred embodiments, the ligand is attached to the oligomeric compound via an intervening tether/linker. The ligand or tethered ligand can be present on a monomer when said monomer is incorporated into the growing strand. In some embodiments, the ligand can be incorporated via coupling to a “precursor” monomer after said “precursor” monomer has been incorporated into the growing strand. For example, a monomer having, e.g., an amino-terminated tether (i.e., having no associated ligand), e.g., monomer-linker-NH₂ can be incorporated into a growing oligomeric compound strand. In a subsequent operation, i.e., after incorporation of the precursor monomer into the strand, a ligand having an electrophilic group, e.g., a pentafluorophenyl ester or aldehyde group, can subsequently be attached to the precursor monomer by coupling the electrophilic group of the ligand with the terminal nucleophilic group of the precursor monomer's tether.

[0278] In another example, a monomer having a chemical group suitable for taking part in Click Chemistry reaction can be incorporated e.g., an azide or alkyne terminated tether/linker. In a subsequent operation, i.e., after incorporation of the precursor monomer into the strand, a ligand having complementary chemical group, e.g. an alkyne or azide can be attached to the precursor monomer by coupling the alkyne and the azide together.

[0279] For double-stranded oligomeric compounds, ligands can be attached to one or both strands. In some embodiments, an siRNA comprises a ligand conjugated to the sense strand. In other embodiments, an siRNA comprises a ligand conjugated to the antisense strand.

[0280] In some embodiments, ligand can be conjugated to nucleobases, sugar moieties, or internucleosidic linkages of oligomeric compound. Conjugation to purine nucleobases or derivatives thereof can occur at any position including, endocyclic and exocyclic atoms. In some embodiments, the 2-, 6-, 7-, or 8-positions of a purine nucleobase are attached to a conjugate moiety. Conjugation to pyrimidine nucleobases or derivatives thereof can also occur at any position. In some embodiments, the 2-, 5-, and 6-positions of a pyrimidine nucleobase can be substituted with a conjugate moiety. When a ligand is conjugated to a nucleobase, the preferred position is one that does not interfere with hybridization, i.e., does not interfere with the hydrogen bonding interactions needed for base pairing.

[0281] Conjugation to sugar moieties of nucleosides can occur at any carbon atom. Example carbon atoms of a sugar moiety that can be attached to a conjugate moiety include the 2′, 3′, and 5′ carbon atoms. The 1′ position can also be attached to a conjugate moiety, such as in an abasic residue. Internucleosidic linkages can also bear conjugate moieties. For phosphorus-containing linkages (e.g., phosphodiester, phosphorothioate, phosphorodithioate, phosphoroamidate, and the like), the conjugate moiety can be attached directly to the phosphorus atom or to an O, N, or S atom bound to the phosphorus atom. For amine- or amide-containing internucleosidic linkages (e.g., PNA), the conjugate moiety can be attached to the nitrogen atom of the amine or amide or to an adjacent carbon atom.

[0282] Inventors have discovered inter alia that REVERSIR compounds conjugated with a ligand are particularly effective in reducing activity of siRNAs. Without wishing to be bound by a theory, a ligand can increase or enhance the ability of a REVERSIR compound by delivering the REVERSIR compound to the desired location of action. Accordingly, in some embodiments, the REVERSIR compound is conjugated with a ligand.

[0283] While useful in delivery of the REVERSIR compound to a desired location of action, the ligand conjugated with the REVERSIR compound can negatively affect the ability of the REVERSIR compound to reduce siRNA activity. Therefore, in some embodiments, the linkage between the ligand and the REVERSIR compound can be designed to undergo cleavage after the REVERSIR compound reaches a desired location of action. This can be accomplished in a number of ways. For example, the linker connecting the REVERSIR compound to the ligand can be a cleavable linker.

[0284] The inventors have also discovered that the nucleoside in the REVERSIR compound that is connected with the ligand can have an effect on the ability of the REVERSIR compound to reduce activity of the siRNA. Inventors have discovered that ligand conjugated nucleosides comprising deoxy sugars (e.g., 2′-deoxy ribose) are particularly effective in enhancing the ability of REVERSIR compounds to reduce siRNA activity. Accordingly, in some embodiments, the nucleoside conjugated with the ligand comprises a deoxy sugar, for example, a 2′-deoxy sugar.

[0285] In some embodiments of the various aspects disclosed herein, the ligand is attached to the nucleoside at the 3′-terminus of the REVERSIR compound. The inventors have discovered inter alia that internucleotide linkage between the ligand conjugated nucleotide and the rest of the REVERSIR compound can also have an effect on the ability of the REVERSIR compound to reduce siRNA activity. Without wishing to be bound by a theory, readily cleavable internucleotide linkages were found to be particularly effective in enhancing the ability of REVERSIR compounds to reduce siRNA activity. Accordingly, in some embodiments, the ligand conjugated nucleotide is attached to the rest of the REVERSIR compound via a cleavable internucleotide linage. In some embodiment, the cleavable internucleotide linkage is a phosphodiester internucleotide linkage.

[0286] In some embodiments, the ligand conjugated nucleotide comprises a deoxy sugar and is linked to rest of the REVERSIR compound via a cleavable internucleotide linkage. In some further embodiments, of this the cleavable internucleotide linkage is a phosphodiester linkage.

[0287] In some embodiments, the ligand conjugated nucleotide comprises a deoxy sugar and is linked to rest of the REVERSIR compound via an internucleotide linkage that is not a phosphodiester linkage.

[0288] In some embodiments, the ligand is conjugated to the nucleotide at the 3′-terminus of the REVERSIR compound.

[0289] In some embodiments, the ligand is conjugated at the 5′-terminus of the REVERSIR compound. In some embodiments, a first ligand is conjugated at the 5′-terminus of the REVERSIR compound and a second ligand conjugated to the first ligand.

[0290] There are numerous methods for preparing conjugates of oligomeric compounds. Generally, an oligomeric compound is attached to a conjugate moiety by contacting a reactive group (e.g., OH, SH, amine, carboxyl, aldehyde, and the like) on the oligomeric compound with a reactive group on the conjugate moiety. In some embodiments, one reactive group is electrophilic and the other is nucleophilic.

[0291] For example, an electrophilic group can be a carbonyl-containing functionality and a nucleophilic group can be an amine or thiol. Methods for conjugation of nucleic acids and related oligomeric compounds with and without linking groups are well described in the literature such as, for example, in Manoharan in Antisense Research and Applications, Crooke and LeBleu, eds., CRC Press, Boca Raton, Fla., 1993, Chapter 17, which is incorporated herein by reference in its entirety.

[0292] Representative U.S. patents that teach the preparation of conjugates of oligomeric compounds, e.g., oligonucleotides, include, but are not limited to, U.S. Pat. Nos. 4,828,979; 4,948,882; 5,218,105; 5,525,465; 5,541,313; 5,545,730; 5,552,538; 5,578,717, 5,580,731; 5,580,731; 5,591,584; 5,109,124; 5,118,802; 5,138,045; 5,414,077; 5,486,603; 5,512,439; 5,578,718; 5,608,046; 4,587,044; 4,605,735; 4,667,025; 4,762,779; 4,789,737; 4,824,941; 4,835,263; 4,876,335; 4,904,582; 4,958,013; 5,082,830; 5,112,963; 5,214,136; 5,082,830; 5,112,963; 5,149,782; 5,214,136; 5,245,022; 5,254,469; 5,258,506; 5,262,536; 5,272,250; 5,292,873; 5,317,098; 5,371,241, 5,391,723; 5,416,203, 5,451,463; 5,510,475; 5,512,667; 5,514,785; 5,565,552; 5,567,810; 5,574,142; 5,585,481; 5,587,371; 5,595,726; 5,597,696; 5,599,923; 5,599,928; 5,672,662; 5,688,941; 5,714,166; 6,153,737; 6,172,208; 6,300,319; 6,335,434; 6,335,437; 6,395,437; 6,444,806; 6,486,308; 6,525,031; 6,528,631; 6,559,279; contents of which are herein incorporated in their entireties by reference.

[0293] In certain embodiments, the oligomeric compound described herein, including but not limited to REVERSIR compounds and siRNAs, comprises a ligand having a structure shown below:

[chemical structure]

wherein:
[0294] L^{G} is independently for each occurrence a ligand, e.g., carbohydrate, e.g. monosaccharide, disaccharide, trisaccharide, tetrasaccharide, polysaccharide; and
[0295] Z′, Z″, Z′″ and Z″″ are each independently for each occurrence O or S.

[0296] In certain embodiments, the oligomeric compound described herein, including but not limited to REVERSIR compounds and siRNAs, comprises a ligand of Formula (II), (III), (IV) or (V):

[chemical structure]

[0297] wherein:
[0298] q^{2A}, q^{2B}, q^{3A}, q^{3B}, q^{4A}, q^{4B}, q^{5A}, q^{5B} and q^{5C} represent independently for each occurrence 0-20 and wherein the repeating unit can be the same or different;
[0299] Q and Q′ are independently for each occurrence is absent, —(P⁷-Q⁷-R⁷)ₚ-T⁷- or -T⁷-Q⁷-T^{7′}-B-T^{8′}-Q⁸-T⁸;
[0300] p^{2A}, p^{2B}, p^{3A}, p^{3B}, p^{4A}, p^{4B}, p^{5A}, p^{5B}, p^{5C}, P⁷, T^{2A}, T^{2B}, T^{3A}, T^{3B}, T^{4A}, T^{4B}, T^{4A}, T^{5B}, T^{5C}, T⁷, T^{7′}, T⁸ and T^{8′} are each independently for each occurrence absent, CO, NH, O, S, OC(O), NHC(O), CH₂, CH₂NH or CH₂O;
[0301] B is —CH₂—N(B^{L})—CH₂—;
[0302] B^{L} is -T^{B}-Q^{B}-T^{B′}-R^{x};
[0303] Q^{2A}, Q^{2B}, Q^{3A}, Q^{3B}, Q^{4A}, Q^{4B}, Q^{5A}, Q^{5B}, Q^{5C}, Q⁷, Q⁸ and Q^{B} are independently for each occurrence absent, alkylene, substituted alkylene and wherein one or more methylenes can be interrupted or terminated by one or more of O, S, S(O), SO₂, N(R^{N}), C(R′)═C(R′), C≡C or C(O);
[0304] T^{B} and T^{B′} are each independently for each occurrence absent, CO, NH, O, S, OC(O), OC(O)O, NHC(O), NHC(O)NH, NHC(O)O, CH₂, CH₂NH or CH₂O;
[0305] R^{x} is a lipophile (e.g., cholesterol, cholic acid, adamantane acetic acid, 1-pyrene butyric acid, dihydrotestosterone, 1,3-Bis-O(hexadecyl)glycerol, geranyloxyhexyl group, hexadecylglycerol, borneol, menthol, 1,3-propanediol, heptadecyl group, palmitic acid, myristic acid,O3-(oleoyl)lithocholic acid, O3-(oleoyl)cholenic acid, dimethoxytrityl, or phenoxazine), a vitamin (e.g., folate, vitamin A, vitamin E, biotin, pyridoxal), a peptide, a carbohydrate (e.g., monosaccharide, disaccharide, trisaccharide, tetrasaccharide, oligosaccharide, polysaccharide), an endosomolytic component, a steroid (e.g., uvaol, hecogenin, diosgenin), a terpene (e.g., triterpene, e.g., sarsasapogenin, Friedelin, epifriedelanol derivatized lithocholic acid), or a cationic lipid;
[0306] R¹, R², R^{2A}, R^{2B}, R^{3A}, R^{3B}, R^{4A}, R^{4B}, R^{5A}, R^{5B}, R^{5C}, R⁷ are each independently for each occurrence absent, NH, O, S, CH₂, C(O)O, C(O)NH, NHCH(R^{a})C(O), —C(O)—CH(R^{a})—

[chemical structure]

or heterocyclyl;
[0307] L¹, L^{2A}, L²B L^{3A}, L^{3B}, L^{4A}, L^{4B}, L^{5A}, L^{5B} and L^{5C} are each independently for each occurrence a carbohydrate, e.g., monosaccharide, disaccharide, trisaccharide, tetrasaccharide, oligosaccharide and polysaccharide;
[0308] R′ and R″ are each independently H, C¹-C6 alkyl, OH, SH, or N(R^{N})₂;
[0309] R^{N} is independently for each occurrence H, methyl, ethyl, propyl, isopropyl, butyl or benzyl;
[0310] R^{a} is H or amino acid side chain;
[0311] Z′, Z″, Z′″ and Z″″ are each independently for each occurrence O or S; p represent independently for each occurrence 0-20.

[0312] In certain embodiments, the oligomeric compound described herein, including but not limited to REVERSIR compounds and siRNAs, comprises a ligand of structure:

[chemical structure]

[0313] In certain embodiments, the oligomeric compound described herein, including but not limited to REVERSIR compounds and siRNAs, comprises a ligand of structure:

[chemical structure]

[0314] In certain embodiments, the oligomeric compound described herein, including but not limited to REVERSIR compounds and siRNAs, comprises a ligand of structure:

[chemical structure]

[0315] In certain embodiments, the oligomeric compound described herein, including but not limited to REVERSIR compounds and siRNAs, comprises a ligand of structure:

[chemical structure]

[0316] In certain embodiments, the oligomeric compound described herein, including but not limited to REVERSIR compounds and siRNAs, comprises a ligand of structure:

[chemical structure]

[0317] In certain embodiments, the oligomeric compound described herein, including but not limited to REVERSIR compounds and siRNAs, comprises a ligand of structure:

[chemical structure]

[0318] In certain embodiments, the oligomeric compound described herein, including but not limited to REVERSIR compounds and siRNAs, comprises a ligand of structure:

[chemical structure]

[0319] In certain embodiments, the oligomeric compound described herein, including but not limited to REVERSIR compounds and siRNAs, comprises a ligand of structure:

[chemical structure]

[0320] In certain embodiments, the oligomeric compound described herein, including but not limited to REVERSIR compounds and siRNAs, comprises a ligand of structure:

[chemical structure]

[0321] In certain embodiments, the oligomeric compound described herein, including but not limited to REVERSIR compounds and siRNAs, comprises a ligand of structure:

[chemical structure]

[0322] In certain embodiments, the oligomeric compound described herein, including but not limited to REVERSIR compounds and siRNAs, comprises a ligand of structure:

[chemical structure]

[0323] In certain embodiments, the oligomeric compound described herein, including but not limited to REVERSIR compounds and siRNAs, comprises a monomer of structure:

[chemical structure]

[0324] In certain embodiments, the oligomeric compound described herein, including but not limited to REVERSIR compounds and siRNAs, comprises a ligand of structure:

[chemical structure]

[0325] In certain embodiments, the oligomeric compound described herein, including but not limited to REVERSIR compounds and siRNAs, comprises a monomer of structure:

[chemical structure]

[0326] In certain embodiments, the oligomeric compound described herein, including but not limited to REVERSIR compounds and siRNAs, comprises a monomer of structure:

[chemical structure]

[0327] In certain embodiments, the oligomeric compound described herein, including but not limited to REVERSIR compounds and siRNAs, comprises a monomer of structure:

[chemical structure]

[0328] In certain embodiments, the oligomeric compound described herein, including but not limited to REVERSIR compounds and siRNAs, comprises a monomer of structure:

[chemical structure]

[0329] In certain embodiments, the oligomeric compound described herein, including but not limited to REVERSIR compounds and siRNAs, comprises a monomer of structure:

[chemical structure]

[0330] In certain embodiments, the oligomeric compound described herein, including but not limited to REVERSIR compounds and siRNAs, comprises a monomer of structure:

[chemical structure]

[0331] In certain embodiments, the oligomeric compound described herein, including but not limited to REVERSIR compounds and siRNAs, comprises a ligand of structure:

[chemical structure]

[0332] In certain embodiments, the oligomeric compound described herein, including but not limited to REVERSIR compounds and siRNAs, comprises a ligand of structure:

[chemical structure]

[0333] In certain embodiments, the oligomeric compound described herein, including but not limited to REVERSIR compounds and siRNAs, comprises a ligand of structure:

[chemical structure]

[0334] In certain embodiments, the oligomeric compound described herein, including but not limited to REVERSIR compounds and siRNAs, comprises a ligand of structure:

[chemical structure]

[0335] In certain embodiments, the oligomeric compound described herein, including but not limited to REVERSIR compounds and siRNAs, comprises a ligand of structure:

[chemical structure]

[0336] In certain embodiments, the oligomeric compound described herein, including but not limited to REVERSIR compounds and siRNAs, comprises a ligand of structure:

[chemical structure]

[0337] In certain embodiments, the oligomeric compound described herein, including but not limited to REVERSIR compounds and siRNAs, comprises a ligand of structure:

[chemical structure]

[0338] In certain embodiments, the oligomeric compound described herein, including but not limited to REVERSIR compounds and siRNAs, comprises a ligand of structure:

[chemical structure]

[0339] In certain embodiments, the oligomeric compound described herein, including but not limited to REVERSIR compounds and siRNAs, comprises a ligand of structure:

[chemical structure]

[0340] In certain embodiments, the oligomeric compound described herein, including but not limited to REVERSIR compounds and siRNAs, comprises a monomer of structure:

[chemical structure]

[0341] In certain embodiments, the oligomeric compound described herein, including but not limited to REVERSIR compounds and siRNAs, comprises a monomer of structure:

[chemical structure]

[0342] In certain embodiments, the oligomeric compound described herein, including but not limited to REVERSIR compounds and siRNAs, comprises a monomer of structure:

[chemical structure]

[0343] In certain embodiments, the oligomeric compound described herein, including but not limited to REVERSIR compounds and siRNAs, comprises a monomer of structure:

[chemical structure]

[0344] In certain embodiments, the oligomeric compound described herein, including but not limited to REVERSIR compounds and siRNAs, comprises a monomer of structure:

[chemical structure]

[0345] In certain embodiments, the oligomeric compound described herein, including but not limited to REVERSIR compounds and siRNAs, comprises a monomer of structure:

[chemical structure]

[0346] In some embodiments both L^{2A} and L^{2B} are different.

[0347] In some preferred embodiments both L^{3A} and L^{3B} are the same.

[0348] In some embodiments both L^{3A} and L^{3B} are different.

[0349] In some preferred embodiments both L^{4A} and L^{4B} are the same.

[0350] In some embodiments both L^{4A} and L^{4B} are different.

[0351] In some preferred embodiments all of L^{5A}L^{5B} and L^{5C} are the same.

[0352] In some embodiments two of L^{5A}L^{5B} and L^{5C} are the same

[0353] In some embodiments L^{5A} and L^{5B} are the same.

[0354] In some embodiments L^{5A} and L^{5C} are the same.

[0355] In some embodiments L^{5B} and L^{5C} are the same.

[0356] In certain embodiments, the oligomeric compound described herein, including but not limited to REVERSIR compounds and siRNAs, comprises a monomer of structure:

[chemical structure]

[0357] In certain embodiments, the oligomeric compound described herein, including but not limited to REVERSIR compounds and siRNAs, comprises a monomer of structure:

[chemical structure]

[0358] In certain embodiments, the oligomeric compound described herein, including but not limited to REVERSIR compounds and siRNAs, comprises a monomer of structure:

[chemical structure]

[0359] In certain embodiments, the oligomeric compound described herein, including but not limited to REVERSIR compounds and siRNAs, comprises a monomer of structure:

[chemical structure]

wherein Y is O or S and n is 3-6.

[0360] In certain embodiments, the oligomeric compound described herein, including but not limited to REVERSIR compounds and siRNAs, comprises a monomer of structure:

[chemical structure]

wherein Y is O or S and n is 3-6.

[0361] In certain embodiments, the oligomeric compound described herein, including but not limited to REVERSIR compounds and siRNAs, comprises a monomer of structure:

[chemical structure]

[0362] In certain embodiments, the oligomeric compound described herein, including but not limited to REVERSIR compounds and siRNAs, comprises a monomer of structure:

[chemical structure]

wherein X is O or S.

[0363] In certain embodiments, the oligomeric compound described herein, including but not limited to REVERSIR compounds and siRNAs, comprises a monomer selected from the group consisting of:

[chemical structure]

[0364] In certain embodiments, the oligomeric compound described herein, including but not limited to REVERSIR compounds and siRNAs, comprises a monomer of structure:

[chemical structure]

wherein R is OH or NHCOOH.

[0365] In certain embodiments, the oligomeric compound described herein, including but not limited to REVERSIR compounds and siRNAs, comprises a monomer of structure:

[chemical structure]

wherein R is OH or NHCOOH.

[0366] In certain embodiments, the oligomeric compound described herein, including but not limited to REVERSIR compounds and siRNAs, comprises a monomer of structure:

[chemical structure]

wherein R is O or S.

[0367] In certain embodiments, the oligomeric compound described herein, including but not limited to REVERSIR compounds and siRNAs, comprises a monomer of structure:

[chemical structure]

wherein R is OH or NHCOOH.

[0368] In certain embodiments, the oligomeric compound described herein, including but not limited to REVERSIR compounds and siRNAs, comprises a monomer of structure:

[chemical structure]

[0369] In certain embodiments, the oligomeric compound described herein, including but not limited to REVERSIR compounds and siRNAs, comprises a monomer of structure:

[chemical structure]

[0370] In certain embodiments, the oligomeric compound described herein, including but not limited to REVERSIR compounds and siRNAs, comprises a monomer of structure:

[chemical structure]

wherein R is OH or NHCOOH.

[0371] In certain embodiments, the oligomeric compound described herein, including but not limited to REVERSIR compounds and siRNAs, comprises a monomer of structure:

[chemical structure]

wherein R is OH or NHCOOH.

[0372] In certain embodiments, the oligomeric compound described herein, including but not limited to REVERSIR compounds and siRNAs, comprises a monomer of structure:

[chemical structure]

wherein R is OH or NHCOOH.

[0373] In certain embodiments, the oligomeric compound described herein, including but not limited to REVERSIR compounds and siRNAs, comprises a monomer of structure:

[chemical structure]

[0374] In the above described monomers, X and Y are each independently for each occurrence H, a protecting group, a phosphate group, a phosphodiester group, an activated phosphate group, an activated phosphite group, a phosphoramidite, a solid support, —P(Z′)(Z″)O-nucleoside, —P(Z′)(Z″)O-oligonucleotide, a lipid, a PEG, a steroid, a polymer, a nucleotide, a nucleoside, or an oligonucleotide; and Z′ and Z″ are each independently for each occurrence O or S.

[0375] In certain embodiments, the REVERSIR compound is conjugated with a ligand of structure:

[chemical structure]

[0376] In certain embodiments, the conjugated siRNA comprises a ligand of structure:

[chemical structure]

[0377] In certain embodiments, the REVERSIR compound comprises a monomer of structure:

[chemical structure]

[0378] Synthesis of above described ligands and monomers is described, for example, in U.S. Pat. No. 8,106,022, content of which is incorporated herein by reference in its entirety.

[0379] In certain embodiments, the oligomeric compound described herein, including but not limited to REVERSIR compounds and siRNAs, comprises a ligand of structure:

[chemical structure]

[0380] In certain embodiments, the oligomeric compound described herein, including but not limited to REVERSIR compounds and siRNAs, comprises a ligand from those described in U.S. Pat. No. 9,181,549 to Prakash et al., the content of which is incorporated herein by reference in its entirety.

[0381] Linking groups or bifunctional linking moieties such as those known in the art are amenable to the compounds provided herein. Linking groups are useful for attachment of chemical functional groups, conjugate groups, reporter groups and other groups to selective sites in a parent compound such as for example an oligomeric compound. In general a bifunctional linking moiety comprises a hydrocarbyl moiety having two functional groups. One of the functional groups is selected to bind to a parent molecule or compound of interest and the other is selected to bind essentially any selected group such as chemical functional group or a conjugate group. In some embodiments, the linker comprises a chain structure or an oligomer of repeating units such as ethylene glycol or amino acid units. Examples of functional groups that are routinely used in a bifunctional linking moiety include, but are not limited to, electrophiles for reacting with nucleophilic groups and nucleophiles for reacting with electrophilic groups. In some embodiments, bifunctional linking moieties include amino, hydroxyl, carboxylic acid, thiol, unsaturations (e.g., double or triple bonds), and the like. Some nonlimiting examples of bifunctional linking moieties include 8-amino-3,6-dioxaoctanoic acid (ADO), succinimidyl 4-(N-maleimidomethyl)cyclohexane-1-carboxylate (SMCC) and 6-aminohexanoic acid (AHEX or AHA). Other linking groups include, but are not limited to, substituted C1-C10 alkyl, substituted or unsubstituted C2-C10 alkenyl or substituted or unsubstituted C2-C10 alkynyl, wherein a nonlimiting list of preferred substituent groups includes hydroxyl, amino, alkoxy, carboxy, benzyl, phenyl, nitro, thiol, thioalkoxy, halogen, alkyl, aryl, alkenyl and alkynyl.

[0382] In certain embodiments, the ligand is conjugated with the oligomeric compound via a linker.

[0383] As used herein, the term “linker” means an organic moiety that connects two parts of a compound. Linkers typically comprise a direct bond or an atom such as oxygen or sulfur, a unit such as NR¹, C(O), C(O)NH, SO, SO₂, SO₂NH or a chain of atoms, such as substituted or unsubstituted alkyl, substituted or unsubstituted alkenyl, substituted or unsubstituted alkynyl, arylalkyl, arylalkenyl, arylalkynyl, heteroarylalkyl, heteroarylalkenyl, heteroarylalkynyl, heterocyclylalkyl, heterocyclylalkenyl, heterocyclylalkynyl, aryl, heteroaryl, heterocyclyl, cycloalkyl, cycloalkenyl, alkylarylalkyl, alkylarylalkenyl, alkylarylalkynyl, alkenylarylalkyl, alkenylarylalkenyl, alkenylarylalkynyl, alkynylarylalkyl, alkynylarylalkenyl, alkynylarylalkynyl, alkylheteroarylalkyl, alkylheteroarylalkenyl, alkylheteroarylalkynyl, alkenylheteroarylalkyl, alkenylheteroarylalkenyl, alkenylheteroarylalkynyl, alkynylheteroarylalkyl, alkynylheteroarylalkenyl, alkynylheteroarylalkynyl, alkylheterocyclylalkyl, alkylheterocyclylalkenyl, alkylhererocyclylalkynyl, alkenylheterocyclylalkyl, alkenylheterocyclylalkenyl, alkenylheterocyclylalkynyl, alkynylheterocyclylalkyl, alkynylheterocyclylalkenyl, alkynylheterocyclylalkynyl, alkylaryl, alkenylaryl, alkynylaryl, alkylheteroaryl, alkenylheteroaryl, alkynylhereroaryl, where one or more methylenes can be interrupted or terminated by O, S, S(O), SO₂, N(R¹)₂, C(O), cleavable linking group, substituted or unsubstituted aryl, substituted or unsubstituted heteroaryl, substituted or unsubstituted heterocyclic; where R^{t} is hydrogen, acyl, aliphatic or substituted aliphatic.

[0384] In one embodiment, the linker is —[(P-Q″-R)_{q}—X—(P′-Q′″—R′)_{q′}]_{q″}-T-, wherein: P, R, T, P′, R′ and T are each independently for each occurrence absent, CO, NH, O, S, OC(O), NHC(O), CH₂, CH₂NH, CH₂O; NHCH(R^{a})C(O), —C(O)—CH(R^{a})—NH—, CH═N—O,

[chemical structure]

heterocyclyl;
[0385] Q″ and Q′″ are each independently for each occurrence absent, —(CH₂)ₙ—, —C(R¹)(R²)(CH₂)ₙ—, —(CH₂)ₙC(R¹)(R²)—, —(CH₂CH₂O)ₘCH₂CH₂—, or —(CH₂CH₂O)ₘCH₂CH₂NH—;
[0386] X is absent or a cleavable linking group;
[0387] R^{a} is H or an amino acid side chain;
[0388] R¹ and R² are each independently for each occurrence H, CH₃, OH, SH or N(R^{N})₂;
[0389] R^{N} is independently for each occurrence H, methyl, ethyl, propyl, isopropyl, butyl or benzyl;
[0390] q, q′ and q″ are each independently for each occurrence 0-20 and wherein the repeating unit can be the same or different;
[0391] n is independently for each occurrence 1-20; and
[0392] m is independently for each occurrence 0-50.

[0393] In some embodiments, the linker comprises at least one cleavable linking group.

[0394] In some embodiments, the linker is a branched linker. The branchpoint of the branched linker may be at least trivalent, but can be a tetravalent, pentavalent or hexavalent atom, or a group presenting such multiple valencies. In some embodiments, the branchpoint is, —N, —N(Q)-C, —O—C, —S—C, —SS—C, —C(O)N(Q)-C, —OC(O)N(Q)-C, —N(Q)C(O)—C, or —N(Q)C(O)O—C; wherein Q is independently for each occurrence H or optionally substituted alkyl. In some embodiments, the branchpoint is glycerol or derivative thereof.

[0395] A cleavable linking group is one which is sufficiently stable outside the cell, but which upon entry into a target cell is cleaved to release the two parts the linker is holding together. In a preferred embodiment, the cleavable linking group is cleaved at least 10 times or more, preferably at least 100 times faster in the target cell or under a first reference condition (which can, e.g., be selected to mimic or represent intracellular conditions) than in the blood or serum of a subject, or under a second reference condition (which can, e.g., be selected to mimic or represent conditions found in the blood or serum).

[0396] Cleavable linking groups are susceptible to cleavage agents, e.g., pH, redox potential or the presence of degradative molecules. Generally, cleavage agents are more prevalent or found at higher levels or activities inside cells than in serum or blood. Examples of such degradative agents include: redox agents which are selected for particular substrates or which have no substrate specificity, including, e.g., oxidative or reductive enzymes or reductive agents such as mercaptans, present in cells, that can degrade a redox cleavable linking group by reduction; esterases; amidases; endosomes or agents that can create an acidic environment, e.g., those that result in a pH of five or lower; enzymes that can hydrolyze or degrade an acid cleavable linking group by acting as a general acid, peptidases (which can be substrate specific) and proteases, and phosphatases.

[0397] A linker can include a cleavable linking group that is cleavable by a particular enzyme. The type of cleavable linking group incorporated into a linker can depend on the cell to be targeted. For example, liver targeting ligands can be linked to the cationic lipids through a linker that includes an ester group. Liver cells are rich in esterases, and therefore the linker will be cleaved more efficiently in liver cells than in cell types that are not esterase-rich. Other cell-types rich in esterases include cells of the lung, renal cortex, and testis.

[0398] Linkers that contain peptide bonds can be used when targeting cell types rich in peptidases, such as liver cells and synoviocytes.

[0399] In some embodiments, cleavable linking group is cleaved at least 1.25, 1.5, 1.75, 2, 3, 4, 5, 10, 25, 50, or 100 times faster in the cell (or under in vitro conditions selected to mimic intracellular conditions) as compared to blood or serum (or under in vitro conditions selected to mimic extracellular conditions). In some embodiments, the cleavable linking group is cleaved by less than 90%, 80%, 70%, 60%, 50%, 40%, 30%, 20%, 10%, 5%, or 1% in the blood (or in vitro conditions selected to mimic extracellular conditions) as compared to in the cell (or under in vitro conditions selected to mimic intracellular conditions).

[0400] Exemplary cleavable linking groups include, but are not limited to, redox cleavable linking groups (e.g., —S—S—and —C(R)₂—S—S—, wherein R is H or C1-C6 alkyl and at least one R is C1-C6 alkyl such as CH₃ or CH₂CH₃); phosphate-based cleavable linking groups (e.g., —O—P(O)(OR)—O—, —O—P(S)(OR)—O—, —O—P(S)(SR)—O—, —S—P(O)(OR)—O—, —O—P(O)(OR)—S—, —S—P(O)(OR)—S—, —O—P(S)(ORk)-S—, —S—P(S)(OR)—O—, —O—P(O)(R)—O—, —O—P(S)(R)—O—, —S—P(O)(R)—O—, —S—P(S)(R)—O—, —S—P(O)(R)—S—, —O—P(S)(R)—S—, —O—P(O)(OH)—O—, —O—P(S)(OH)—O—, —O—P(S)(SH)—O—, —S—P(O)(OH)—O—, —O—P(O)(OH)—S—, —S—P(O)(OH)—S—, —O—P(S)(OH)—S—, —S—P(S)(OH)—O—, —O—P(O)(H)—O—, —O—P(S)(H)—O—, —S—P(O)(H)—O—, —S—P(S)(H)—O—, —S—P(O)(H)—S—, and —O—P(S)(H)—S—, wherein R is optionally substituted linear or branched C₁-C₁₀ alkyl); acid cleavable linking groups (e.g., hydrazones, esters, and esters of amino acids, —C═NN— and —OC(O)—); ester-based cleavable linking groups (e.g., —C(O)O—); peptide-based cleavable linking groups, (e.g., linking groups that are cleaved by enzymes such as peptidases and proteases in cells, e.g., —NHCHR^{A}C(O)NHCHR^{B}C(O)—, where R^{A} and R^{B} are the R groups of the two adjacent amino acids). A peptide based cleavable linking group comprises two or more amino acids. In some embodiments, the peptide-based cleavage linkage comprises the amino acid sequence that is the substrate for a peptidase or a protease found in cells.

[0401] In some embodiments, an acid cleavable linking group is cleaveable in an acidic environment with a pH od about 6.5 or lower (e.g., about 6.-, 5.5, 5.0, or lower), or by agents such as enzymes that can act as a general acid.

[0402] In some embodiments, the linker is an oligonucleotide linker including, but not limited to, (N)ₙ; wherein N is independently a modified or unmodified nucleotide and n is 1-23. In some embodiments, n is 1-10, e.g., 1, 2, 3, 4, 5, 6, 7, 8, 9, or 10. In some embodiments, the oligonucleotide linker is selected from the group consisting of GNRA, (G)₄, (U)₄, and (dT)₄, wherein N is a modified or unmodified nucleotide and R is a modified or unmodified purine nucleotide. Some of the nucleotides in the linker can be involved in base-pair interactions with other nucleotides in the linker. It will be appreciated by one of skill in the art that any oligonucleotide chemical modifications or variations describe herein can be used in the oligonucleotide linker. In certain embodiments, the linker is dA.

### Motifs

[0403] The present invention also includes oligomeric compounds which are chimeric oligomeric compounds. “Chimeric” oligomeric compounds or “chimeras,” in the context of this invention, are oligomeric compounds which contain two or more chemically distinct regions, each made up of at least one monomer unit, i.e., a modified or unmodified nucleotide in the case of an oligonucleotide. Chimeric oligomeric compounds can be described as having a particular motif. In some embodiments, the motifs include, but are not limited to, an alternating motif, a gapped motif, a hemimer motif, a uniformly fully modified motif and a positionally modified motif. As used herein, the phrase “chemically distinct region” refers to an oligomeric region which is different from other regions by having a modification that is not present elsewhere in the oligomeric compound or by not having a modification that is present elsewhere in the oligomeric compound. An oligomeric compound can comprise two or more chemically distinct regions. As used herein, a region that comprises no modifications is also considered chemically distinct.

[0404] A chemically distinct region can be repeated within an oligomeric compound. Thus, a pattern of chemically distinct regions in an oligomeric compound can be realized such that a first chemically distinct region is followed by one or more second chemically distinct regions. This sequence of chemically distinct regions can be repeated one or more times. Preferably, the sequence is repeated more than one time. Both strands of a double-stranded oligomeric compound can comprise these sequences. Each chemically distinct region can actually comprise as little as a single monomers, e.g., nucleotides. In some embodiments, each chemically distinct region comprises 1, 2, 3, 4, 5, 6, 7, 8, 9, 10, 11, 12, 13, 14, 15, 16, 17 or 18 monomers, e.g., nucleotides.

[0405] In some embodiments, alternating nucleotides comprise the same modification, e.g. all the odd number nucleotides in a strand have the same modification and/or all the even number nucleotides in a strand have the similar modification to the first strand. In some embodiments, all the odd number nucleotides in an oligomeric compound have the same modification and all the even numbered nucleotides have a modification that is not present in the odd number nucleotides and vice versa.

[0406] When both strands of a double-stranded oligomeric compound comprise the alternating modification patterns, nucleotides of one strand can be complementary in position to nucleotides of the second strand which are similarly modified. In an alternative embodiment, there is a phase shift between the patterns of modifications of the first strand, respectively, relative to the pattern of similar modifications of the second strand. Preferably, the shift is such that the similarly modified nucleotides of the first strand and second strand are not in complementary position to each other.

[0407] In some embodiments, the first strand has an alternating modification pattern wherein alternating nucleotides comprise a 2′-modification, e.g., 2′-O-Methyl modification. In some embodiments, the first strand comprises an alternating 2′-O-Methyl modification and the second strand comprises an alternating 2′-fluoro modification. In other embodiments, both strands of a double-stranded oligonucleotide comprise alternating 2′-O-methyl modifications.

[0408] When both strands of a double-stranded oligonucleotide comprise alternating 2′-O-methyl modifications, such 2′-modified nucleotides can be in complementary position in the duplex region. Alternatively, such 2′-modified nucleotides may not be in complementary positions in the duplex region.

[0409] In some embodiments, the oligonucleotide comprises two chemically distinct regions, wherein each region is 1, 2, 3, 4, 5, 6, 7, 8, 9 or 10 nucleotides in length.

[0410] In other embodiments, the oligomeric compound comprises three chemically distinct region. The middle region is about 5-15, (e.g., 5, 6, 7, 8, 9, 10, 11, 12, 13, 14 or 15) nucleotide in length and each flanking or wing region is independently 1-10 (e.g., 1, 2, 3, 4, 5, 6, 7, 8, 9 or 10) nucleotides in length. All three regions can have different modifications or the wing regions can be similarly modified to each other. In some embodiments, the wing regions are of equal length, e.g. 1, 2, 3, 4, 5, 6, 7, 8, 9 or 10 nucleotides long.

[0411] As used herein the term “alternating motif” refers to an oligomeric compound comprising a contiguous sequence of linked monomer subunits wherein the monomer subunits have two different types of sugar groups that alternate for essentially the entire sequence of the oligomeric compound. Oligomeric compounds having an alternating motif can be described by the formula: 5′-A(-L-B-L-A)n(-L-B)nn-3′ where A and B are monomelic subunits that have different sugar groups, each L is an internucleoside linking group, n is from about 4 to about 12 and nn is 0 or 1. This permits alternating oligomeric compounds from about 9 to about 26 monomer subunits in length. This length range is not meant to be limiting as longer and shorter oligomeric compounds are also amenable to the present invention. In one embodiment, one of A and B is a 2′-modified nucleoside as provided herein.

[0412] As used herein, “type of modification” in reference to a nucleoside or a nucleoside of a “type” refers to the modification of a nucleoside and includes modified and unmodified nucleosides. Accordingly, unless otherwise indicated, a “nucleoside having a modification of a first type” may be an unmodified nucleoside.

[0413] As used herein, “type region” refers to a portion of an oligomeric compound wherein the nucleosides and internucleoside linkages within the region all comprise the same type of modifications; and the nucleosides and/or the internucleoside linkages of any neighboring portions include at least one different type of modification. As used herein the term “uniformly fully modified motif” refers to an oligonucleotide comprising a contiguous sequence of linked monomer subunits that each have the same type of sugar group. In one embodiment, the uniformly fully modified motif includes a contiguous sequence of nucleosides of the invention. In one embodiment, one or both of the 3′ and 5′-ends of the contiguous sequence of the nucleosides provided herein, comprise terminal groups such as one or more unmodified nucleosides.

[0414] As used herein the term “hemimer motif” refers to an oligomeric compound having a short contiguous sequence of monomer subunits having one type of sugar group located at the 5′ or the 3′ end wherein the remainder of the monomer subunits have a different type of sugar group. In general, a hemimer is an oligomeric compound of uniform sugar groups further comprising a short region (1, 2, 3, 4 or about 5 monomelic subunits) having uniform but different sugar groups and located on either the 3′ or the 5′ end of the oligomeric compound. In one embodiment, the hemimer motif comprises a contiguous sequence of from about 10 to about 28 monomer subunits of one type with from 1 to 5 or from 2 to about 5 monomer subunits of a second type located at one of the termini. In one embodiment, a hemimer is a contiguous sequence of from about 8 to about 20β-D-2′-deoxyribonucleosides having from 1-12 contiguous nucleosides of the invention located at one of the termini. In one embodiment, a hemimer is a contiguous sequence of from about 8 to about 20β-D-2′-deoxyribonucleosides having from 1-5 contiguous nucleosides of the invention located at one of the termini. In one embodiment, a hemimer is a contiguous sequence of from about 12 to about 18β-D-2′-deoxyribo-nucleosides having from 1-3 contiguous nucleosides of the invention located at one of the termini. In one embodiment, a hemimer is a contiguous sequence of from about 10 to about 14β3-D-2′-deoxyribonucleosides having from 1-3 contiguous nucleosides of the invention located at one of the termini.

[0415] As used herein the term “blockmer motif” refers to an oligonucleotide comprising an otherwise contiguous sequence of monomer subunits wherein the sugar groups of each monomer subunit is the same except for an interrupting internal block of contiguous monomer subunits having a different type of sugar group. A blockmer overlaps somewhat with a gapmer in the definition but typically only the monomer subunits in the block have non-naturally occurring sugar groups in a blockmer and only the monomer subunits in the external regions have non-naturally occurring sugar groups in a gapmer with the remainder of monomer subunits in the blockmer or gapmer being β-D-2′-deoxyribonucleosides or β-D-ribonucleosides. In one embodiment, blockmer oligonucleotides are provided herein wherein all of the monomer subunits comprise non-naturally occurring sugar groups.

[0416] As used herein the term “positionally modified motif” is meant to include an otherwise contiguous sequence of monomer subunits having one type of sugar group that is interrupted with two or more regions of from 1 to about 5 contiguous monomer subunits having another type of sugar group. Each of the two or more regions of from 1 to about 5 contiguous monomer subunits are independently uniformly modified with respect to the type of sugar group. In one embodiment, each of the two or more regions have the same type of sugar group. In one embodiment, each of the two or more regions have a different type of sugar group. In one embodiment, positionally modified oligonucleotides are provided comprising a sequence of from 8 to 20β-D-2′-deoxyribonucleosides that further includes two or three regions of from 2 to about 5 contiguous nucleosides of the invention. Positionally modified oligonucleotides are distinguished from gapped motifs, hemimer motifs, blockmer motifs and alternating motifs because the pattern of regional substitution defined by any positional motif does not fit into the definition provided herein for one of these other motifs. The term positionally modified oligomeric compound includes many different specific substitution patterns.

[0417] As used herein the term “gapmer” or “gapped oligomeric compound” refers to an oligomeric compound having two external regions or wings and an internal region or gap. The three regions form a contiguous sequence of monomer subunits with the sugar groups of the external regions being different than the sugar groups of the internal region and wherein the sugar group of each monomer subunit within a particular region is the same. When the sugar groups of the external regions are the same the gapmer is a symmetric gapmer and when the sugar group used in the 5′-external region is different from the sugar group used in the 3′-external region, the gapmer is an asymmetric gapmer. In one embodiment, the external regions are small (each independently 1, 2, 3, 4 or about 5 monomer subunits) and the monomer subunits comprise non-naturally occurring sugar groups with the internal region comprising β-D-2′-deoxyribonucleosides. In one embodiment, the external regions each, independently, comprise from 1 to about 5 monomer subunits having non-naturally occurring sugar groups and the internal region comprises from 6 to 18 unmodified nucleosides. The internal region or the gap generally comprises β-D-2′-deoxyribo-nucleosides but can comprise non-naturally occurring sugar groups.

[0418] In one embodiment, the gapped oligomeric compounds comprise an internal region of β-D-2′-deoxyribonucleosides with one of the external regions comprising nucleosides of the invention. In one embodiment, the gapped oligonucleotide comprise an internal region of β-D-2′-deoxyribonucleosides with both of the external regions comprising nucleosides of the invention. In one embodiment, the gapped oligonucleotide comprise an internal region of β-D-2′-deoxyribonucleosides with both of the external regions comprising nucleosides of the invention. In one embodiment, gapped oligonucleotides are provided herein wherein all of the monomer subunits comprise non-naturally occurring sugar groups. In one embodiment, gapped oligonucleotides are provided comprising one or two nucleosides of the invention at the 5′-end, two or three nucleosides of the invention at the 3′-end and an internal region of from 10 to 16β-D-2′-deoxyribonucleosides. In one embodiment, gapped oligonucleotides are provided comprising one nucleoside of the invention at the 5′-end, two nucleosides of the invention at the 3′-end and an internal region of from 10 to 16β-D-2′-deoxyribonucleosides. In one embodiment, gapped oligonucleotides are provided comprising two nucleosides of the invention at the 5′-end, two nucleosides of the invention at the 3′-end and an internal region of from 10 to 14β-D-2′-deoxyribonucleosides. In one embodiment, gapped oligonucleotides are provided that are from about 10 to about 21 monomer subunits in length. In one embodiment, gapped oligonucleotides are provided that are from about 12 to about 16 monomer subunits in length. In one embodiment, gapped oligonucleotides are provided that are from about 12 to about 14 monomer subunits in length.

[0419] In certain embodiments, the 5′-terminal monomer of an oligomeric compound of the invention comprises a phosphorous moiety at the 5′-end. In certain embodiments the 5′-terminal monomer comprises a 2′-modification. In certain such embodiments, the 2′-modification of the 5′-terminal monomer is a cationic modification. In certain embodiments, the 5′-terminal monomer comprises a 5′-modification. In certain embodiments, the 5′-terminal monomer comprises a 2′-modification and a 5′-modification. In certain embodiments, the 5′-terminal monomer is a 5′-stabilizing nucleoside. In certain embodiments, the modifications of the 5′-terminal monomer stabilize the 5′-phosphate. In certain embodiments, oligomeric compounds comprising modifications of the 5′-terminal monomer are resistant to exonucleases. In certain embodiments, oligomeric compounds comprising modifications of the 5′-terminal monomer have improved REVERSIR properties. In certain such embodiments, oligomeric compound comprising modifications of the 5′-terminal monomer have improved association with a strand of the siRNA.

[0420] In certain embodiments, the 5′ terminal monomer is attached to rest of the oligomeric compound a modified linkage. In certain such embodiments, the 5′ terminal monomer is attached to rest of the oligomeric compound by a phosphorothioate linkage.

[0421] In certain embodiments, oligomeric compounds of the present invention comprise one or more regions of alternating modifications. In certain embodiments, oligomeric compounds comprise one or more regions of alternating nucleoside modifications. In certain embodiments, oligomeric compounds comprise one or more regions of alternating linkage modifications. In certain embodiments, oligomeric compounds comprise one or more regions of alternating nucleoside and linkage modifications.

[0422] In certain embodiments, oligomeric compounds of the present invention comprise one or more regions of alternating 2′-F modified nucleosides and 2′-OMe modified nucleosides. In certain such embodiments, such regions of alternating 2′F modified and 2′OMe modified nucleosides also comprise alternating linkages. In certain such embodiments, the linkages at the 3′ end of the 2′-F modified nucleosides are phosphorothioate linkages. In certain such embodiments, the linkages at the 3′end of the 2′OMe nucleosides are phosphodiester linkages.

[0423] In certain embodiments, such alternating regions are:

(2′-F)—(PS)—(2′-OMe)—(PO)

[0424] In certain embodiments, oligomeric compounds comprise 2, 3, 4, 5, 6, 7, 8, 9, 10, or 11 such alternating regions. Such regions may be contiguous or may be interrupted by differently modified nucleosides or linkages.

[0425] In certain embodiments, one or more alternating regions in an alternating motif include more than a single nucleoside of a type. For example, oligomeric compounds of the present invention may include one or more regions of any of the following nucleoside motifs:
[0426] ABA;
[0427] ABBA;
[0428] AABA;
[0429] AABBAA;
[0430] ABBABB;
[0431] AABAAB;
[0432] ABBABAABB;
[0433] ABABAA;
[0434] AABABAB;
[0435] ABABAA;
[0436] ABBAABBABABAA;
[0437] BABBAABBABABAA; or
[0438] ABABBAABBABABAA;
   wherein A is a nucleoside of a first type and B is a nucleoside of a second type. In certain embodiments, A and B are each selected from 2′-F, 2′-OMe, LNA, DNA and MOE.

[0439] In certain embodiments, A is DNA. In certain embodiments B is DNA. In some embodiments, A is 4′-CH₂O-2′-LNA. In certain embodiments, B is 4′-CH₂O-2′-LNA. In certain embodiments, A is DNA and B is 4′-CH₂O-2′-LNA. In certain embodiments A is 4′-CH₂O-2′-LNA and B is DNA.

[0440] In certain embodiments, A is 2′-OMe. In certain embodiments B is 2′-OMe. In certain embodiments, A is 2′-OMe and B is 4′-CH₂O-2′-LNA. In certain embodiments A is 4′-CH₂O-2′-LNA and B is 2′-OMe. In certain embodiments, A is 2′-OMe and B is DNA. In certain embodiments A is DNA and B is 2′-OMe.

[0441] In certain embodiments, A is (S)-cEt. In some embodiments, B is (S)-cEt. In certain embodiments, A is 2′-OMe and B is (S)-cEt. In certain embodiments A is (S)-cEt and B is 2′-OMe. In certain embodiments, A is DNA and B is (S)-cEt. In certain embodiments A is (S)-cEt and B is DNA.

[0442] In certain embodiments, A is 2′-F. In certain embodiments B is 2′-F. In certain embodiments, A is 2′-F and B is 4′-CH₂O-2′-LNA. In certain embodiments A is 4′-CH₂O-2′-LNA and B is 2′-F. In certain embodiments, A is 2′-F and B is (S)-cEt. In certain embodiments A is (S)-cEt and B is 2′-F. In certain embodiments, A is 2′-F and B is DNA. In certain embodiments A is DNA and B is 2′-F. In certain embodiments, A is 2′-OMe and B is 2′-F. In certain embodiments, A is DNA and B is 2′-OMe. In certain embodiments, A is 2′-OMe and B is DNA.

[0443] In certain embodiments, oligomeric compounds having such an alternating motif also comprise a 5′ terminal nucleoside comprising a phosphate stabilizing modification. In certain embodiments, oligomeric compounds having such an alternating motif also comprise a 5′ terminal nucleoside comprising a 2′-cationic modification. In certain embodiments, oligomeric compounds having such an alternating motif also comprise a 5′ terminal modification.

### Two-Two-Three Motifs

[0444] In certain embodiments, oligomeric compounds of the present invention comprise a region having a 2-2-3 motif. Such regions comprises the following motif:

5′-(E)_{w}-(A)₂—(B)ₓ-(A)₂—(C)_{y}-(A)₃-(D)_{z}
[0445] wherein: A is a first type of modified nucleoside;
[0446] B, C, D, and E are nucleosides that are differently modified than A, however, B, C, D, and E may have the same or different modifications as one another;
[0447] w and z are from 0 to 15;
[0448] x and y are from 1 to 15.

[0449] In certain embodiments, A is a 2′-OMe modified nucleoside. In certain embodiments, B, C, D, and E are all 2′-F modified nucleosides. In certain embodiments, A is a 2′-OMe modified nucleoside and B, C, D, and E are all 2′-F modified nucleosides.

[0450] In certain embodiments, the linkages of a 2-2-3 motif are all modified linkages. In certain embodiments, the linkages are all phosphorothioate linkages. In certain embodiments, the linkages at the 3′-end of each modification of the first type are phosphodiester.

[0451] In certain embodiments, Z is 0. In such embodiments, the region of three nucleosides of the first type are at the 3′-end of the oligonucleotide. In certain embodiments, such region is at the 3′-end of the oligomeric compound, with no additional groups attached to the 3′ end of the region of three nucleosides of the first type. In certain embodiments, an oligomeric compound comprising an oligonucleotide where Z is 0, may comprise a terminal group attached to the 3′-terminal nucleoside. Such terminal groups may include additional nucleosides. Such additional nucleosides are typically non-hybridizing nucleosides.

[0452] In certain embodiments, Z is 1-3. In certain embodiments, Z is 2. In certain embodiments, the nucleosides of Z are 2′-MOE nucleosides. In certain embodiments, Z represents non-hybridizing nucleosides. To avoid confusion, it is noted that such non-hybridizing nucleosides might also be described as a 3′-terminal group with Z=0.

### Combination Motifs

[0453] It is to be understood, that certain of the above described motifs and modifications can be combined. Since a motif may comprises only a few nucleosides, a particular oligomeric compound can comprise two or more motifs. By way of non-limiting example, in certain embodiments, oligomeric compounds can have two or more nucleoside motifs selected from LNAs, phosphorthioate linkages, 2′-OMe, conjugated ligand(s).

[0454] Oligomeric compounds having any of the various nucleoside motifs described herein, can have also have any linkage motif. For example, in the oligomeric compounds first 1, 2, 3, 4 or 5 at the 5′-end be modified intersugar linkages and first 4, 5, 6, 7 or 8 intersugar linkages at the 3′-end can be modified intersugar linkages. The central region of such modified oligomeric compound can have intersugar linkages based on the any of the other motifs described herein, for example, uniform, alternating, hemimer, gapmer, and the like. In some embodiments, the oligomeric compound comprise a phosphorothioate linkage between the first and second monomer at the 5′-terminus, alternating phosphorothioate/phosphodiester linkages in the central region and 6, 7, or 8 phosphorothioate linkages at the 3′-terminus.

[0455] It is to be noted that the lengths of the regions defined by a nucleoside motif and that of a linkage motif need not be the same.

[0456] In some embodiments, single-stranded oligomeric compounds or at least one strand of a double-stranded oligomeric compound, includes at least one of the following motifs:
[0457] (a) 5′-phosphorothioate or 5′-phosphorodithioate;
[0458] (b) a cationic modification of nucleotides 1 and 2 on the 5′ terminal, wherein the cationic modification is at C5 position of pyrimidines and C2, C6, C8, exocyclic N2 or exocyclic N6 of purines;
[0459] (c) at least one G-clamp nucleotide in the first two terminal nucleotides at the 5′ end and the other nucleotide having a cationic modification, wherein the cationic modification is at C5 position of pyrimidines or C2, C6, C8, exocyclic N2 or exocyclic N6 position of purines;
[0460] (d) at least one 2′-F modified nucleotide comprising a nucleobase base modification;
[0461] (e) at least one gem-2′-O-methyl/2′—F modified nucleotide comprising a nucleobase modification, preferably the methyl substituent is in the up configuration, e.g. in the arabinose configuration;
[0462] (f) a 5′-PuPu-3′ dinucleotide at the 3′ terminal wherein both nucleotides comprise a modified MOE at 2′-position as described in U.S. Patent Application Publication No. 20130130378, content of which is incorporated herein by reference in its entirety.
[0463] (g) a 5′-PuPu-3′ dinucleotide at the 5′ terminal wherein both nucleotides comprise a modified MOE at 2′-position as described in U.S. Patent Application Publication No. 20130130378;
[0464] (h) nucleotide at the 5′ terminal having a modified MOE at 2′-position as described in U.S. Patent Application Publication No. 20130130378;
[0465] (i) nucleotide at the 5′ terminal having a 3′-F modification;
[0466] (j) 5′ terminal nucleotide comprising a 4′-substituent;
[0467] (k) 5′ terminal nucleotide comprising a O4′ modification;
[0468] (l) 3′ terminal nucleotide comprising a 4′-substituent; and
[0469] (m) combinations thereof.

[0470] In some embodiments, both strands of a double-stranded oligomeric compound independently comprise at least one of the above described motifs. In some other embodiments, both strands of a double-stranded oligomeric compound comprise at least one at least one of the above described motifs, which motifs can be same or different or some combination of same and different.

[0471] The above examples are provided solely to illustrate how the described motifs may be used in combination and are not intended to limit the invention to the particular combinations or the particular modifications used in illustrating the combinations. Further, specific examples herein, including, but not limited to those in the above table are intended to encompass more generic embodiments. For example, column A in the above table exemplifies a region of alternating 2′-OMe and 2′-F nucleosides. Thus, that same disclosure also exemplifies a region of alternating different 2′-modifications. It also exemplifies a region of alternating 2′-O-alkyl and 2′-halogen nucleosides. It also exemplifies a region of alternating differently modified nucleosides. All of the examples throughout this specification contemplate such generic interpretation.

[0472] It is also noted that the lengths of oligomeric compounds, such as those exemplified in the above tables, can be easily manipulated by lengthening or shortening one or more of the described regions, without disrupting the motif.

[0473] In some embodiments, oligomeric compound comprises two or more chemically distinct regions and has a structure as described in International Application No. PCT/US09/038433, filed Mar. 26, 2009, contents of which are herein incorporated in their entirety.

### Synthesis, Purification and Analysis

[0474] Oligomerization of modified and unmodified nucleosides and nucleotides can be routinely performed according to literature procedures for DNA (Protocols for Oligonucleotides and Analogs, Ed. Agrawal (1993), Humana Press) and/or RNA (Scaringe, Methods (2001), 23, 206-217. Gait et al., Applications of Chemically synthesized RNA in RNA: Protein Interactions, Ed. Smith (1998), 1-36. Gallo et al., Tetrahedron (2001), 57, 5707-5713).

[0475] Oligomeric compounds provided herein can be conveniently and routinely made through the well-known technique of solid phase synthesis. Equipment for such synthesis is sold by several vendors including, for example, Applied Biosystems (Foster City, Calif). Any other means for such synthesis known in the art may additionally or alternatively be employed. It is well known to use similar techniques to prepare oligonucleotides such as the phosphorothioates and alkylated derivatives. The invention is not limited by the method of antisense compound synthesis.

[0476] Methods of purification and analysis of oligomeric compounds are known to those skilled in the art. Analysis methods include capillary electrophoresis (CE) and electrospray-mass spectroscopy. Such synthesis and analysis methods can be performed in multi-well plates. The method of the invention is not limited by the method of oligomer purification.

[0477] The oligomeric compounds of the invention can be prepared using solution-phase or solid-phase organic synthesis, or enzymatically by methods known in the art. Organic synthesis offers the advantage that the oligomeric strands comprising non-natural or modified nucleotides can be easily prepared. Any other means for such synthesis known in the art can additionally or alternatively be employed. It is also known to use similar techniques to prepare other oligomeric compounds, such as those comprising phosphorothioates, phosphorodithioates and alkylated derivatives of intersugar linkages. The double-stranded oligomeric compounds of the invention can be prepared using a two-step procedure. First, the individual strands of the double-stranded molecule are prepared separately. Then, the component strands are annealed.

[0478] Regardless of the method of synthesis, the oligomeric compounds can be prepared in a solution (e.g., an aqueous and/or organic solution) that is appropriate for formulation. For example, the oligomeric preparation can be precipitated and redissolved in pure double-distilled water, and lyophilized. The dried oligomeric compound can then be resuspended in a solution appropriate for the intended formulation process.

[0479] Teachings regarding the synthesis of particular modified oligomeric compounds can be found in the following U.S. patents or pending patent applications: U.S. Pat. Nos. 5,138,045 and 5,218,105, drawn to polyamine conjugated oligonucleotides; U.S. Pat. No. 5,212,295, drawn to monomers for the preparation of oligonucleotides having chiral phosphorus linkages; U.S. Pat. Nos. 5,378,825 and 5,541,307, drawn to oligonucleotides having modified backbones; U.S. Pat. No. 5,386,023, drawn to backbone-modified oligonucleotides and the preparation thereof through reductive coupling; U.S. Pat. No. 5,457,191, drawn to modified nucleobases based on the 3-deazapurine ring system and methods of synthesis thereof, U.S. Pat. No. 5,459,255, drawn to modified nucleobases based on N-2 substituted purines; U.S. Pat. No. 5,521,302, drawn to processes for preparing oligonucleotides having chiral phosphorus linkages; U.S. Pat. No. 5,539,082, drawn to peptide nucleic acids; U.S. Pat. No. 5,554,746, drawn to oligonucleotides having beta-lactam backbones; U.S. Pat. No. 5,571,902, drawn to methods and materials for the synthesis of oligonucleotides; U.S. Pat. No. 5,578,718, drawn to nucleosides having alkylthio groups, wherein such groups can be used as linkers to other moieties attached at any of a variety of positions of the nucleoside; U.S. Pat. Nos. 5,587,361 and 5,599,797, drawn to oligonucleotides having phosphorothioate linkages of high chiral purity; U.S. Pat. No. 5,506,351, drawn to processes for the preparation of 2′-O-alkyl guanosine and related compounds, including 2,6-diaminopurine compounds; U.S. Pat. No. 5,587,469, drawn to oligonucleotides having N-2 substituted purines; U.S. Pat. No. 5,587,470, drawn to oligonucleotides having 3-deazapurines; U.S. Pat. Nos. 5,223,168, and 5,608,046, both drawn to conjugated 4′-desmethyl nucleoside analogs; U.S. Pat. Nos. 5,602,240, and 5,610,289, drawn to backbone-modified oligonucleotide analogs; and U.S. Pat. Nos. 6,262,241, and 5,459,255, drawn to, inter alia, methods of synthesizing 2′-fluoro-oligonucleotides.

### Compositions and Methods for Formulating Pharmaceutical Compositions

[0480] Oligomeric compounds can be admixed with pharmaceutically acceptable active and/or inert substances for the preparation of pharmaceutical compositions or formulations. Compositions and methods for the formulation of pharmaceutical compositions are dependent upon a number of criteria, including, but not limited to, route of administration, extent of disease, or dose to be administered.

[0481] Oligomeric compounds, including siRNAs and/or REVERSIR compounds, can be utilized in pharmaceutical compositions by combining such oligomeric compounds with a suitable pharmaceutically acceptable diluent or carrier. A pharmaceutically acceptable diluent includes phosphate-buffered saline (PBS). PBS is a diluent suitable for use in compositions to be delivered parenterally. Accordingly, in one embodiment, employed in the methods described herein is a pharmaceutical composition comprising an antisense compound and/or antidote compound and a pharmaceutically acceptable diluent. In certain embodiments, the pharmaceutically acceptable diluent is PBS.

[0482] Pharmaceutical compositions comprising oligomeric compounds encompass any pharmaceutically acceptable salts, esters, or salts of such esters. In certain embodiments, pharmaceutical compositions comprising oligomeric compounds comprise one or more oligonucleotide which, upon administration to an animal, including a human, is capable of providing (directly or indirectly) the biologically active metabolite or residue thereof. Accordingly, for example, the disclosure is also drawn to pharmaceutically acceptable salts of antisense compounds, prodrugs, pharmaceutically acceptable salts of such prodrugs, and other bioequivalents. Suitable pharmaceutically acceptable salts include, but are not limited to, sodium and potassium salts.

[0483] A prodrug can include the incorporation of additional nucleosides at one or both ends of an oligomeric compound which are cleaved by endogenous nucleases within the body, to form the active oligomeric compound.

[0484] The pharmaceutical compositions of the present invention may be administered in a number of ways depending upon whether local or systemic treatment is desired and upon the area to be treated. Administration may be topical (e.g., by a transdermal patch), pulmonary, e.g., by inhalation or insufflation of powders or aerosols, including by nebulizer; intratracheal, intranasal, epidermal and transdermal, oral or parenteral. Parenteral administration includes intravenous, intraarterial, subcutaneous, intraperitoneal or intramuscular injection or infusion; subdermal, e.g., via an implanted device; or intracranial, e.g., by intraparenchymal, intrathecal or intraventricular, administration.

[0485] The oligomeric compounds can be delivered in a manner to target a particular tissue, such as the liver (e.g., the hepatocytes of the liver).

[0486] Pharmaceutical compositions and formulations for topical administration may include transdermal patches, ointments, lotions, creams, gels, drops, suppositories, sprays, liquids and powders. Conventional pharmaceutical carriers, aqueous, powder or oily bases, thickeners and the like may be necessary or desirable. Coated condoms, gloves and the like may also be useful. Suitable topical formulations include those in which the iRNAs featured in the invention are in admixture with a topical delivery agent such as lipids, liposomes, fatty acids, fatty acid esters, steroids, chelating agents and surfactants. Suitable lipids and liposomes include neutral (e.g., dioleoylphosphatidyl DOPE ethanolamine, dimyristoylphosphatidyl choline DMPC, disteroylphosphatidyl choline) negative (e.g., dimyristoylphosphatidyl glycerol DMPG) and cationic (e.g., dioleoyltetramethylaminopropyl DOTAP and dioleoylphosphatidyl ethanolamine DOTMA). iRNAs featured in the invention may be encapsulated within liposomes or may form complexes thereto, in particular to cationic liposomes. Alternatively, iRNAs may be complexed to lipids, in particular to cationic lipids. Suitable fatty acids and esters include but are not limited to arachidonic acid, oleic acid, eicosanoic acid, lauric acid, caprylic acid, capric acid, myristic acid, palmitic acid, stearic acid, linoleic acid, linolenic acid, dicaprate, tricaprate, monoolein, dilaurin, glyceryl 1-monocaprate, 1-dodecylazacycloheptan-2-one, an acylcarnitine, an acylcholine, or a C₁₋₂₀ alkyl ester (e.g., isopropylmyristate IPM), monoglyceride, diglyceride or pharmaceutically acceptable salt thereof. Topical formulations are described in detail in U.S. Pat. No. 6,747,014, which is incorporated herein by reference.

[0487] There are many organized surfactant structures besides microemulsions that have been studied and used for the formulation of drugs. These include monolayers, micelles, bilayers and vesicles. Vesicles, such as liposomes, have attracted great interest because of their specificity and the duration of action they offer from the standpoint of drug delivery. As used in the present invention, the term “liposome” means a vesicle composed of amphiphilic lipids arranged in a spherical bilayer or bilayers.

[0488] Liposomes are unilamellar or multilamellar vesicles which have a membrane formed from a lipophilic material and an aqueous interior. The aqueous portion contains the composition to be delivered. Cationic liposomes possess the advantage of being able to fuse to the cell wall. Non-cationic liposomes, although not able to fuse as efficiently with the cell wall, are taken up by macrophages in vivo.

[0489] Further advantages of liposomes include; liposomes obtained from natural phospholipids are biocompatible and biodegradable; liposomes can incorporate a wide range of water and lipid soluble drugs; liposomes can protect encapsulated drugs in their internal compartments from metabolism and degradation (Rosoff, in Pharmaceutical Dosage Forms, Lieberman, Rieger and Banker (Eds.), 1988, Marcel Dekker, Inc., New York, N.Y., volume 1, p. 245). Important considerations in the preparation of liposome formulations are the lipid surface charge, vesicle size and the aqueous volume of the liposomes.

[0490] Liposomes are useful for the transfer and delivery of active ingredients to the site of action. Because the liposomal membrane is structurally similar to biological membranes, when liposomes are applied to a tissue, the liposomes start to merge with the cellular membranes and as the merging of the liposome and cell progresses, the liposomal contents are emptied into the cell where the active agent may act.

[0491] Liposomal formulations have been the focus of extensive investigation as the mode of delivery for many drugs. There is growing evidence that for topical administration, liposomes present several advantages over other formulations. Such advantages include reduced side-effects related to high systemic absorption of the administered drug, increased accumulation of the administered drug at the desired target, and the ability to administer a wide variety of drugs, both hydrophilic and hydrophobic, into the skin.

[0492] Several reports have detailed the ability of liposomes to deliver agents including high-molecular weight DNA into the skin. Compounds including analgesics, antibodies, hormones and high-molecular weight DNAs have been administered to the skin. The majority of applications resulted in the targeting of the upper epidermis

[0493] Liposomes fall into two broad classes. Cationic liposomes are positively charged liposomes which interact with the negatively charged DNA molecules to form a stable complex. The positively charged DNA/liposome complex binds to the negatively charged cell surface and is internalized in an endosome. Due to the acidic pH within the endosome, the liposomes are ruptured, releasing their contents into the cell cytoplasm (Wang et al., Biochem. Biophys. Res. Commun., 1987, 147, 980-985).

[0494] Liposomes which are pH-sensitive or negatively-charged, entrap DNA rather than complex with it. Since both the DNA and the lipid are similarly charged, repulsion rather than complex formation occurs. Nevertheless, some DNA is entrapped within the aqueous interior of these liposomes. pH-sensitive liposomes have been used to deliver DNA encoding the thymidine kinase gene to cell monolayers in culture. Expression of the exogenous gene was detected in the target cells (Zhou et al., Journal of Controlled Release, 1992, 19, 269-274).

[0495] One major type of liposomal composition includes phospholipids other than naturally-derived phosphatidylcholine. Neutral liposome compositions, for example, can be formed from dimyristoyl phosphatidylcholine (DMPC) or dipalmitoyl phosphatidylcholine (DPPC). Anionic liposome compositions generally are formed from dimyristoyl phosphatidylglycerol, while anionic fusogenic liposomes are formed primarily from dioleoyl phosphatidylethanolamine (DOPE). Another type of liposomal composition is formed from phosphatidylcholine (PC) such as, for example, soybean PC, and egg PC. Another type is formed from mixtures of phospholipid and/or phosphatidylcholine and/or cholesterol.

[0496] Several studies have assessed the topical delivery of liposomal drug formulations to the skin. Application of liposomes containing interferon to guinea pig skin resulted in a reduction of skin herpes sores while delivery of interferon via other means (e.g., as a solution or as an emulsion) were ineffective (Weiner et al., Journal of Drug Targeting, 1992, 2, 405-410). Further, an additional study tested the efficacy of interferon administered as part of a liposomal formulation to the administration of interferon using an aqueous system, and concluded that the liposomal formulation was superior to aqueous administration (du Plessis et al., Antiviral Research, 1992, 18, 259-265).

[0497] Non-ionic liposomal systems have also been examined to determine their utility in the delivery of drugs to the skin, in particular systems comprising non-ionic surfactant and cholesterol. Non-ionic liposomal formulations comprising Novasome™ I (glyceryl dilaurate/cholesterol/polyoxyethylene-10-stearyl ether) and Novasome™ II (glyceryl distearate/cholesterol/polyoxyethylene-10-stearyl ether) were used to deliver cyclosporin-A into the dermis of mouse skin. Results indicated that such non-ionic liposomal systems were effective in facilitating the deposition of cyclosporin-A into different layers of the skin (Hu et al. S.T.P.Pharma. Sci., 1994, 4, 6, 466).

[0498] Liposomes also include “sterically stabilized” liposomes, a term which, as used herein, refers to liposomes comprising one or more specialized lipids that, when incorporated into liposomes, result in enhanced circulation lifetimes relative to liposomes lacking such specialized lipids. Examples of sterically stabilized liposomes are those in which part of the vesicle-forming lipid portion of the liposome (A) comprises one or more glycolipids, such as monosialoganglioside G_{M1}, or (B) is derivatized with one or more hydrophilic polymers, such as a polyethylene glycol (PEG) moiety. While not wishing to be bound by any particular theory, it is thought in the art that, at least for sterically stabilized liposomes containing gangliosides, sphingomyelin, or PEG-derivatized lipids, the enhanced circulation half-life of these sterically stabilized liposomes derives from a reduced uptake into cells of the reticuloendothelial system (RES) (Allen et al., FEBS Letters, 1987, 223, 42; Wu et al., Cancer Research, 1993, 53, 3765).

[0499] Various liposomes comprising one or more glycolipids are known in the art. Papahadjopoulos et al. (Ann. N.Y. Acad. Sci., 1987, 507, 64) reported the ability of monosialoganglioside GM1, galactocerebroside sulfate and phosphatidylinositol to improve blood half-lives of liposomes. These findings were expounded upon by Gabizon et al. (Proc. Natl. Acad. Sci. U.S.A., 1988, 85, 6949). U.S. Pat. No. 4,837,028 and WO 88/04924, both to Allen et al., disclose liposomes comprising (1) sphingomyelin and (2) the ganglioside GM1 or a galactocerebroside sulfate ester. U.S. Pat. No. 5,543,152 (Webb et al.) discloses liposomes comprising sphingomyelin. Liposomes comprising 1,2-sn-dimyristoylphosphatidylcholine are disclosed in WO 97/13499 (Lim et al).

[0500] Many liposomes comprising lipids derivatized with one or more hydrophilic polymers, and methods of preparation thereof, are known in the art. Sunamoto et al. (Bull. Chem. Soc. Jpn., 1980, 53, 2778) described liposomes comprising a nonionic detergent, 2C1215G, that contains a PEG moiety. Illum et al. (FEBS Lett., 1984, 167, 79) noted that hydrophilic coating of polystyrene particles with polymeric glycols results in significantly enhanced blood half-lives. Synthetic phospholipids modified by the attachment of carboxylic groups of polyalkylene glycols (e.g., PEG) are described by Sears (U.S. Pat. Nos. 4,426,330 and 4,534,899). Klibanov et al. (FEBS Lett., 1990, 268, 235) described experiments demonstrating that liposomes comprising phosphatidylethanolamine (PE) derivatized with PEG or PEG stearate have significant increases in blood circulation half-lives. Blume et al. (Biochimica et Biophysica Acta, 1990, 1029, 91) extended such observations to other PEG-derivatized phospholipids, e.g., DSPE-PEG, formed from the combination of distearoylphosphatidylethanolamine (DSPE) and PEG. Liposomes having covalently bound PEG moieties on their external surface are described in European Patent No. EP 0 445 131 B1 and WO 90/04384 to Fisher. Liposome compositions containing 1-20 mole percent of PE derivatized with PEG, and methods of use thereof, are described by Woodle et al. (U.S. Pat. Nos. 5,013,556 and 5,356,633) and Martin et al. (U.S. Pat. No. 5,213,804 and European Patent No. EP 0 496 813 B1). Liposomes comprising a number of other lipid-polymer conjugates are disclosed in WO 91/05545 and U.S. Pat. No. 5,225,212 (both to Martin et al.) and in WO 94/20073 (Zalipsky et al.) Liposomes comprising PEG-modified ceramide lipids are described in WO 96/10391 (Choi et al). U.S. Pat. No. 5,540,935 (Miyazaki et al.) and U.S. Pat. No. 5,556,948 (Tagawa et al.) describe PEG-containing liposomes that can be further derivatized with functional moieties on their surfaces.

[0501] A number of liposomes comprising nucleic acids are known in the art. WO 96/40062 to Thierry et al. discloses methods for encapsulating high molecular weight nucleic acids in liposomes. U.S. Pat. No. 5,264,221 to Tagawa et al. discloses protein-bonded liposomes and asserts that the contents of such liposomes may include a dsRNA. U.S. Pat. No. 5,665,710 to Rahman et al. describes certain methods of encapsulating oligodeoxynucleotides in liposomes. WO 97/04787 to Love et al. discloses liposomes comprising dsRNAs targeted to the raf gene.

[0502] Transfersomes are yet another type of liposomes, and are highly deformable lipid aggregates which are attractive candidates for drug delivery vehicles. Transfersomes may be described as lipid droplets which are so highly deformable that they are easily able to penetrate through pores which are smaller than the droplet. Transfersomes are adaptable to the environment in which they are used, e.g., they are self-optimizing (adaptive to the shape of pores in the skin), self-repairing, frequently reach their targets without fragmenting, and often self-loading. To make transfersomes it is possible to add surface edge-activators, usually surfactants, to a standard liposomal composition. Transfersomes have been used to deliver serum albumin to the skin. The transfersome-mediated delivery of serum albumin has been shown to be as effective as subcutaneous injection of a solution containing serum albumin.

[0503] Liposome compositions can be prepared by a variety of methods that are known in the art. See e.g., U.S. Pat. Nos. 4,235,871; 4,737,323; 4,897,355 and 5,171,678; published International Applications WO 96/14057 and WO 96/37194; Felgner, P. L. et al., Proc. Natl. Acad. Sci., USA (1987) 8:7413-7417, Bangham, et al. M. Mol. Biol. (1965) 23:238, Olson, et al. Biochim. Biophys. Acta (1979) 557:9, Szoka, et al. Proc. Natl. Acad. Sci. (1978) 75: 4194, Mayhew, et al. Biochim. Biophys. Acta (1984) 775:169, Kim, et al. Biochim. Biophys. Acta (1983) 728:339, and Fukunaga, et al. Endocrinol. (1984) 115:757.

[0504] Surfactants find wide application in formulations such as emulsions (including microemulsions) and liposomes. The most common way of classifying and ranking the properties of the many different types of surfactants, both natural and synthetic, is by the use of the hydrophile/lipophile balance (HLB). The nature of the hydrophilic group (also known as the “head”) provides the most useful means for categorizing the different surfactants used in formulations (Rieger, in Pharmaceutical Dosage Forms, Marcel Dekker, Inc., New York, N.Y., 1988, p. 285).

[0505] If the surfactant molecule is not ionized, it is classified as a nonionic surfactant. Nonionic surfactants find wide application in pharmaceutical and cosmetic products and are usable over a wide range of pH values. In general their HLB values range from 2 to about 18 depending on their structure. Nonionic surfactants include nonionic esters such as ethylene glycol esters, propylene glycol esters, glyceryl esters, polyglyceryl esters, sorbitan esters, sucrose esters, and ethoxylated esters. Nonionic alkanolamides and ethers such as fatty alcohol ethoxylates, propoxylated alcohols, and ethoxylated/propoxylated block polymers are also included in this class. The polyoxyethylene surfactants are the most popular members of the nonionic surfactant class.

[0506] If the surfactant molecule carries a negative charge when it is dissolved or dispersed in water, the surfactant is classified as anionic. Anionic surfactants include carboxylates such as soaps, acyl lactylates, acyl amides of amino acids, esters of sulfuric acid such as alkyl sulfates and ethoxylated alkyl sulfates, sulfonates such as alkyl benzene sulfonates, acyl isethionates, acyl taurates and sulfosuccinates, and phosphates. The most important members of the anionic surfactant class are the alkyl sulfates and the soaps.

[0507] If the surfactant molecule carries a positive charge when it is dissolved or dispersed in water, the surfactant is classified as cationic. Cationic surfactants include quaternary ammonium salts and ethoxylated amines. The quaternary ammonium salts are the most used members of this class.

[0508] If the surfactant molecule has the ability to carry either a positive or negative charge, the surfactant is classified as amphoteric. Amphoteric surfactants include acrylic acid derivatives, substituted alkylamides, N-alkylbetaines and phosphatides.

[0509] The use of surfactants in drug products, formulations and in emulsions has been reviewed (Rieger, in Pharmaceutical Dosage Forms, Marcel Dekker, Inc., New York, N.Y., 1988, p. 285).

### Lipid Particles

[0510] In some embodiments, the REVERSIR can be fully encapsulated in a lipid formulation, e.g., a LNP, or other nucleic acid-lipid particle. The REVERSIR encapsulated in the lipid formulation can be unconjugated or conjugated with a ligand (i.e., a conjugated REVERSIR).

[0511] As used herein, the term “LNP” refers to a stable nucleic acid-lipid particle. LNPs contain a cationic lipid, a non-cationic lipid, and a lipid that prevents aggregation of the particle (e.g., a PEG-lipid conjugate). LNPs are extremely useful for systemic applications, as they exhibit extended circulation lifetimes following intravenous (i.v.) injection and accumulate at distal sites (e.g., sites physically separated from the administration site). LNPs include “pSPLP,” which include an encapsulated condensing agent-nucleic acid complex as set forth in PCT Publication No. WO 00/03683. The particles of the present invention typically have a mean diameter of about 50 nm to about 150 nm, more typically about 60 nm to about 130 nm, more typically about 70 nm to about 110 nm, most typically about 70 nm to about 90 nm, and are substantially nontoxic. In addition, the nucleic acids when present in the nucleic acid-lipid particles of the present invention are resistant in aqueous solution to degradation with a nuclease. Nucleic acid-lipid particles and their method of preparation are disclosed in, e.g., U.S. Pat. Nos. 5,976,567; 5,981,501; 6,534,484; 6,586,410; 6,815,432; U.S. Publication No. 2010/0324120 and PCT Publication No. WO 96/40964.

[0512] In some embodiments, the lipid to drug ratio (mass/mass ratio) (e.g., lipid to REVERSIR ratio) will be in the range of from about 1:1 to about 50:1, from about 1:1 to about 25:1, from about 3:1 to about 15:1, from about 4:1 to about 10:1, from about 5:1 to about 9:1, or about 6:1 to about 9:1. Ranges intermediate to the above recited ranges are also contemplated to be part of the invention.

[0513] The cationic lipid can be, for example, N,N-dioleyl-N,N-dimethylammonium chloride (DODAC), N,N-distearyl-N,N-dimethylammonium bromide (DDAB), N—(I-(2,3-dioleoyloxy)propyl)-N,N,N-trimethylammonium chloride (DOTAP), N—(I-(2,3-dioleyloxy)propyl)-N,N,N-trimethylammonium chloride (DOTMA), N,N-dimethyl-2,3-dioleyloxy)propylamine (DODMA), 1,2-DiLinoleyloxy-N,N-dimethylaminopropane (DLinDMA), 1,2-Dilinolenyloxy-N,N-dimethylaminopropane (DLenDMA), 1,2-Dilinoleylcarbamoyloxy-3-dimethylaminopropane (DLin-C-DAP), 1,2-Dilinoleyoxy-3-(dimethylamino)acetoxypropane (DLin-DAC), 1,2-Dilinoleyoxy-3-morpholinopropane (DLin-MA), 1,2-Dilinoleoyl-3-dimethylaminopropane (DLinDAP), 1,2-Dilinoleylthio-3-dimethylaminopropane (DLin-S-DMA), 1-Linoleoyl-2-linoleyloxy-3-dimethylaminopropane (DLin-2-DMAP), 1,2-Dilinoleyloxy-3-trimethylaminopropane chloride salt (DLin-TMA.Cl), 1,2-Dilinoleoyl-3-trimethylaminopropane chloride salt (DLin-TAP.Cl), 1,2-Dilinoleyloxy-3-(N-methylpiperazino)propane (DLin-MPZ), or 3-(N,N-Dilinoleylamino)-1,2-propanediol (DLinAP), 3-(N,N-Dioleylamino)-1,2-propanedio (DOAP), 1,2-Dilinoleyloxo-3-(2-N,N-dimethylamino)ethoxypropane (DLin-EG-DMA), 1,2-Dilinolenyloxy-N,N-dimethylaminopropane (DLinDMA), 2,2-Dilinoleyl-4-dimethylaminomethyl-[1,3]-dioxolane (DLin-K-DMA) or analogs thereof, (3aR,5s,6aS)—N,N-dimethyl-2,2-di((9Z,12Z)-octadeca-9,12-dienyl)tetrahydro-3aH-cyclopenta[d][1,3]dioxol-5-amine (ALN100), (6Z,9Z,28Z,31Z)-heptatriaconta-6,9,28,31-tetraen-19-yl 4-(dimethylamino)butanoate (MC3), 1,1′-(2-(4-(2-((2-(bis(2-hydroxydodecyl)amino)ethyl)(2-hydroxydodecyl)amino)ethyl)piperazin-1-yl)ethylazanediyl)didodecan-2-ol, or a mixture thereof. The cationic lipid can comprise from about 20 mol % to about 50 mol % or about 40 mol % of the total lipid present in the particle.

[0514] In some embodiments, the compound 2,2-Dilinoleyl-4-dimethylaminoethyl-[1,3]-dioxolane can be used to prepare lipid-REVERSIR nanoparticles. Synthesis of 2,2-Dilinoleyl-4-dimethylaminoethyl-[1,3]-dioxolane is described in International application no. PCT/US2009/061897, published as WO/2010/048536, which is herein incorporated by reference.

[0515] In some embodiments, the lipid-REVERSIR particle includes 40% 2, 2-Dilinoleyl-4-dimethylaminoethyl-[1,3]-dioxolane: 10% DSPC: 40% Cholesterol: 10% PEG-C-DOMG (mole percent) with a particle size of 63.0±20 nm and a 0.027 REVERSIR/Lipid Ratio.

[0516] The ionizable/non-cationic lipid can be an anionic lipid or a neutral lipid including, but not limited to, distearoylphosphatidylcholine (DSPC), dioleoylphosphatidylcholine (DOPC), dipalmitoylphosphatidylcholine (DPPC), dioleoylphosphatidylglycerol (DOPG), dipalmitoylphosphatidylglycerol (DPPG), dioleoyl-phosphatidylethanolamine (DOPE), palmitoyloleoylphosphatidylcholine (POPC), palmitoyloleoylphosphatidylethanolamine (POPE), dioleoyl-phosphatidylethanolamine 4-(N-maleimidomethyl)-cyclohexane-1-carboxylate (DOPE-mal), dipalmitoyl phosphatidyl ethanolamine (DPPE), dimyristoylphosphoethanolamine (DMPE), distearoyl-phosphatidyl-ethanolamine (DSPE), 16-O-monomethyl PE, 16-O-dimethyl PE, 18-1-trans PE, 1-stearoyl-2-oleoyl-phosphatidyethanolamine (SOPE), cholesterol, or a mixture thereof. The non-cationic lipid can be from about 5 mol % to about 90 mol %, about 10 mol %, or about 58 mol % if cholesterol is included, of the total lipid present in the particle.

[0517] The conjugated lipid that inhibits aggregation of particles can be, for example, a polyethyleneglycol (PEG)-lipid including, without limitation, a PEG-diacylglycerol (DAG), a PEG-dialkyloxypropyl (DAA), a PEG-phospholipid, a PEG-ceramide (Cer), or a mixture thereof. The PEG-DAA conjugate can be, for example, a PEG-dilauryloxypropyl (C₁₂), a PEG-dimyristyloxypropyl (C₁₄), a PEG-dipalmityloxypropyl (C₁₆), or a PEG-distearyloxypropyl (C₁₈). The conjugated lipid that prevents aggregation of particles can be from 0 mol % to about 20 mol % or about 2 mol % of the total lipid present in the particle.

[0518] In some embodiments, the nucleic acid-lipid particle further includes cholesterol at, e.g., about 10 mol % to about 60 mol % or about 48 mol % of the total lipid present in the particle.

[0519] Additional exemplary lipid-REVERSIR formulations are described in Table 1 below.

TABLE 1
Exemplary lipid REVERSIR formulations

| | | cationic lipid/non-cationic |
|---|---|---|
| | | lipid/cholesterol/PEG-lipid conjugate |
| Formulation | Ionizable/Cationic Lipid | Lipid:REVERSIR ratio |
| LNP_DLinDMA | 1,2-Dilinolenyloxy-N,N- | DLinDMA/DPPC/Cholesterol/PEG-cDMA |
| | dimethylaminopropane (DLinDMA) | (57.1/7.1/34.4/1.4) |
| | | lipid:REVERSIR~7:1 |
| 2-XTC | 2,2-Dilinoleyl-4-dimethylaminoethyl-[1,3]- | XTC/DPPC/Cholesterol/PEG-cDMA |
| | dioxolane (XTC) | 57.1/7.1/34.4/1.4 |
| | | lipid:REVERSIR~7:1 |
| LNP05 | 2,2-Dilinoleyl-4-dimethylaminoethyl-[1,3]- | XTC/DSPC/Cholesterol/PEG-DMG |
| | dioxolane (XTC) | 57.5/7.5/31.5/3.5 |
| | | lipid:REVERSIR~6:1 |
| LNP06 | 2,2-Dilinoleyl-4-dimethylaminoethyl-[1,3]- | XTC/DSPC/Cholesterol/PEG-DMG |
| | dioxolane (XTC) | 57.5/7.5/31.5/3.5 |
| | | lipid:REVERSIR~11:1 |
| LNP07 | 2,2-Dilinoleyl-4-dimethylaminoethyl-[1,3]- | XTC/DSPC/Cholesterol/PEG-DMG |
| | dioxolane (XTC) | 60/7.5/31/1.5, |
| | | lipid:REVERSIR~6:1 |
| LNP08 | 2,2-Dilinoleyl-4-dimethylaminoethyl-[1,3]- | XTC/DSPC/Cholesterol/PEG-DMG |
| | dioxolane (XTC) | 60/7.5/31/1.5, |
| | | lipid:REVERSIR~11:1 |
| LNP09 | 2,2-Dilinoleyl-4-dimethylaminoethyl-[1,3]- | XTC/DSPC/Cholesterol/PEG-DMG |
| | dioxolane (XTC) | 50/10/38.5/1.5 |
| | | Lipid:REVERSIR 10:1 |
| LNP10 | (3aR,5s,6aS)-N,N-dimethyl-2,2-di((9Z,12Z)- | ALN100/DSPC/Cholesterol/PEG-DMG |
| | octadeca-9,12-dienyl)tetrahydro-3aH- | 50/10/38.5/1.5 |
| | cyclopenta[d][1,3]dioxol-5-amine (ALN100) | Lipid:REVERSIR 10:1 |
| LNP11 | (6Z,9Z,28Z,31Z)-heptatriaconta-6,9,28,31- | MC-3/DSPC/Cholesterol/PEG-DMG |
| | tetraen-19-yl 4-(dimethylamino)butanoate | 50/10/38.5/1.5 |
| | (MC3) | Lipid:REVERSIR 10:1 |
| LNP12 | 1,1′-(2-(4-(2-((2-(bis(2- | Tech G1/DSPC/Cholesterol/PEG-DMG |
| | hydroxydodecyl)amino)ethyl)(2- | 50/10/38.5/1.5 |
| | hydroxydodecyl)amino)ethyl)piperazin-1- | Lipid:REVERSIR 10:1 |
| | yl)ethylazanediyl)didodecan-2-ol (C12-200> | |
| LNP13 | XTC | XTC/DSPC/Chol/PEG-DMG |
| | | 50/10/38.5/1.5 |
| | | Lipid:REVERSIR: 33:1 |
| LNP14 | MC3 | MC3/DSPC/Chol/PEG-DMG |
| | | 40/15/40/5 |
| | | Lipid:REVERSIR: 11:1 |
| LNP15 | MC3 | MC3/DSPC/Chol/PEG-DSG/GalNAc-PEG- |
| | | DSG |
| | | 50/10/35/4.5/0.5 |
| | | Lipid:REVERSIR: 11:1 |
| LNP16 | MC3 | MC3/DSPC/Chol/PEG-DMG |
| | | 50/10/38.5/1.5 |
| | | Lipid:REVERSIR: 7:1 |
| LNP17 | MC3 | MC3/DSPC/Chol/PEG-DSG |
| | | 50/10/38.5/1.5 |
| | | Lipid:REVERSIR: 10:1 |
| LNP18 | MC3 | MC3/DSPC/Chol/PEG-DMG |
| | | 50/10/38.5/1.5 |
| | | Lipid:REVERSIR: 12:1 |
| LNP19 | MC3 | MC3/DSPC/Chol/PEG-DMG |
| | | 50/10/35/5 |
| | | Lipid:REVERSIR: 8:1 |
| LNP20 | MC3 | MC3/DSPC/Chol/PEG-DPG |
| | | 50/10/38.5/1.5 |
| | | Lipid:REVERSIR: 10:1 |
| LNP21 | C12-200 | C12-200/DSPC/Chol/PEG-DSG |
| | | 50/10/38.5/1.5 |
| | | Lipid:REVERSIR: 7:1 |
| LNP22 | XTC | XTC/DSPC/Chol/PEG-DSG |
| | | 50/10/38.5/1.5 |
| | | Lipid:REVERSIR: 10:1 |
| LNPX | (13Z,16Z)-N,N-dimethyl-3-nonyldocosa- | (13Z,16Z)-N,N-dimethyl-3-nonyldocosa- |
| | 13,16-dien-1-amine | 13,16-dien-1-amine/DSPC/Chol/PEG-DSG |
| | | 50/10/38.5/1.5 |
| | | Lipid:REVERSIR: 10:1 |
| LNPY | Biodegradable lipid | Biodegradable lipid/DSPC/Chol/PEG-DSG |
| | | 50/10/38.5/1.5 |
| | | Lipid:REVERSIR: 10:1 |

*The REVERSIR can be an unconjugated or conjugated with a ligand (i.e., conjugated REVERSIR).

[0520] Abbreviations in Table 1 include the following: DSPC: distearoylphosphatidylcholine; DPPC: dipalmitoylphosphatidylcholine; PEG-DMG: PEG-didimyristoyl glycerol (C14-PEG, or PEG-C14) (PEG with avg mol wt of 2000); PEG-DSG: PEG-distyryl glycerol (C18-PEG, or PEG-C18) (PEG with avg mol wt of 2000); PEG-cDMA: PEG-carbamoyl-1,2-dimyristyloxypropylamine (PEG with avg mol wt of 2000).

[0521] DLinDMA (1,2-Dilinolenyloxy-N,N-dimethylaminopropane) comprising formulations are described in International Publication No. WO2009/127060, filed Apr. 15, 2009, which is hereby incorporated by reference.

[0522] XTC comprising formulations are described, e.g., in U.S. Provisional Ser. No. 61/148,366, filed Jan. 29, 2009; U.S. Provisional Ser. No. 61/156,851, filed Mar. 2, 2009; U.S. Provisional Serial No. filed Jun. 10, 2009; U.S. Provisional Ser. No. 61/228,373, filed Jul. 24, 2009; U.S. Provisional Ser. No. 61/239,686, filed Sep. 3, 2009, and International Application No. PCT/US2010/022614, filed Jan. 29, 2010, which are hereby incorporated by reference.

[0523] MC3 comprising formulations are described, e.g., in U.S. Publication No. 2010/0324120, filed Jun. 10, 2010, the entire contents of which are hereby incorporated by reference.

[0524] Biodegradable lipid comprising formulations are described, e.g., PCT Publications No. WO2011/153493, filed Jun. 3, 2011 and WO/2013/086354, filed Dec. 7, 2012, the entire contents of which are hereby incorporated by reference.

[0525] (13Z,16Z)—N,N-dimethyl-3-nonyldocosa-13,16-dien-1-amine comprising formulations are described, e.g., in PCT Publications No. WO/2012/040184, filed Sep. 20, 2011, the entire contents of which are hereby incorporated by reference.

[0526] The oligomeric compounds of the invention can be prepared and formulated as micelles. As used herein, “micelles” are a particular type of molecular assembly in which amphipathic molecules are arranged in a spherical structure such that all hydrophobic portions on the molecules are directed inward, leaving the hydrophilic portions in contact with the surrounding aqueous phase. The converse arrangement exists if the environment is hydrophobic.

[0527] In some embodiments, the formulations comprises micelles formed from an oligonucleotide of the invention and at least one amphiphilic carrier, in which the micelles have an average diameter of less than about 100 nm, preferably. More preferred embodiments provide micelles having an average diameter less than about 50 nm, and even more preferred embodiments provide micelles having an average diameter less than about 30 nm, or even less than about 20 nm.

[0528] Micelle formulations can be prepared by mixing an aqueous solution of the oligonucleotide composition, an alkali metal C8 to C22 alkyl sulphate, and an amphiphilic carrier. The amphiphilic carrier can be added at the same time or after addition of the alkali metal alkyl sulphate. Micelles will form with substantially any kind of mixing of the ingredients but vigorous mixing in order to provide smaller size micelles.

[0529] The oligomeric compounds of the present invention can be prepared and formulated as emulsions. As used herein, “emulsion” is a heterogenous system of one liquid dispersed in another in the form of droplets.

[0530] Emulsions are often biphasic systems comprising two immiscible liquid phases intimately mixed and dispersed with each other. In general, emulsions may be of either the water-in-oil (w/o) or the oil-in-water (o/w) variety. When an aqueous phase is finely divided into and dispersed as minute droplets into a bulk oily phase, the resulting composition is called a water-in-oil (w/o) emulsion. Alternatively, when an oily phase is finely divided into and dispersed as minute droplets into a bulk aqueous phase, the resulting composition is called an oil-in-water (o/w) emulsion. Emulsions may contain additional components in addition to the dispersed phases, and the active drug which may be present as a solution in either the aqueous phase, oily phase or itself as a separate phase. Pharmaceutical excipients such as emulsifiers, stabilizers, dyes, and anti-oxidants may also be present in emulsions as needed. Pharmaceutical emulsions may also be multiple emulsions that are comprised of more than two phases such as, for example, in the case of oil-in-water-in-oil (o/w/o) and water-in-oil-in-water (w/o/w) emulsions. Such complex formulations often provide certain advantages that simple binary emulsions do not. Multiple emulsions in which individual oil droplets of an o/w emulsion enclose small water droplets constitute a w/o/w emulsion. Likewise a system of oil droplets enclosed in globules of water stabilized in an oily continuous phase provides an o/w/o emulsion.

[0531] Emulsions are characterized by little or no thermodynamic stability. Often, the dispersed or discontinuous phase of the emulsion is well dispersed into the external or continuous phase and maintained in this form through the means of emulsifiers or the viscosity of the formulation. Either of the phases of the emulsion may be a semisolid or a solid, as is the case of emulsion-style ointment bases and creams. Other means of stabilizing emulsions entail the use of emulsifiers that may be incorporated into either phase of the emulsion. Emulsifiers may broadly be classified into four categories: synthetic surfactants, naturally occurring emulsifiers, absorption bases, and finely dispersed solids (Idson, in Pharmaceutical Dosage Forms, Lieberman, Rieger and Banker (Eds.), 1988, Marcel Dekker, Inc., New York, N.Y., volume 1, p. 199).

[0532] Synthetic surfactants, also known as surface active agents, have found wide applicability in the formulation of emulsions and have been reviewed in the literature (Rieger, in Pharmaceutical Dosage Forms, Lieberman, Rieger and Banker (Eds.), 1988, Marcel Dekker, Inc., New York, N.Y., volume 1, p. 285; Idson, in Pharmaceutical Dosage Forms, Lieberman, Rieger and Banker (Eds.), Marcel Dekker, Inc., New York, N.Y., 1988, volume 1, p. 199). Surfactants are typically amphiphilic and comprise a hydrophilic and a hydrophobic portion. The ratio of the hydrophilic to the hydrophobic nature of the surfactant has been termed the hydrophile/lipophile balance (HLB) and is a valuable tool in categorizing and selecting surfactants in the preparation of formulations. Surfactants may be classified into different classes based on the nature of the hydrophilic group: nonionic, anionic, cationic and amphoteric (Rieger, in Pharmaceutical Dosage Forms, Lieberman, Rieger and Banker (Eds.), 1988, Marcel Dekker, Inc., New York, N.Y., volume 1, p. 285).

[0533] Naturally occurring emulsifiers used in emulsion formulations include lanolin, beeswax, phosphatides, lecithin and acacia. Absorption bases possess hydrophilic properties such that they can soak up water to form w/o emulsions yet retain their semisolid consistencies, such as anhydrous lanolin and hydrophilic petrolatum. Finely divided solids have also been used as good emulsifiers especially in combination with surfactants and in viscous preparations. These include polar inorganic solids, such as heavy metal hydroxides, nonswelling clays such as bentonite, attapulgite, hectorite, kaolin, montmorillonite, colloidal aluminum silicate and colloidal magnesium aluminum silicate, pigments and nonpolar solids such as carbon or glyceryl tristearate.

[0534] A large variety of non-emulsifying materials is also included in emulsion formulations and contributes to the properties of emulsions. These include fats, oils, waxes, fatty acids, fatty alcohols, fatty esters, humectants, hydrophilic colloids, preservatives and antioxidants (Block, in Pharmaceutical Dosage Forms, Lieberman, Rieger and Banker (Eds.), 1988, Marcel Dekker, Inc., New York, N.Y., volume 1, p. 335; Idson, in Pharmaceutical Dosage Forms, Lieberman, Rieger and Banker (Eds.), 1988, Marcel Dekker, Inc., New York, N.Y., volume 1, p. 199).

[0535] Hydrophilic colloids or hydrocolloids include naturally occurring gums and synthetic polymers such as polysaccharides (for example, acacia, agar, alginic acid, carrageenan, guar gum, karaya gum, and tragacanth), cellulose derivatives (for example, carboxymethylcellulose and carboxypropylcellulose), and synthetic polymers (for example, carbomers, cellulose ethers, and carboxyvinyl polymers). These disperse or swell in water to form colloidal solutions that stabilize emulsions by forming strong interfacial films around the dispersed-phase droplets and by increasing the viscosity of the external phase.

[0536] Since emulsions often contain a number of ingredients such as carbohydrates, proteins, sterols and phosphatides that may readily support the growth of microbes, these formulations often incorporate preservatives. Commonly used preservatives included in emulsion formulations include methyl paraben, propyl paraben, quaternary ammonium salts, benzalkonium chloride, esters of p-hydroxybenzoic acid, and boric acid. Antioxidants are also commonly added to emulsion formulations to prevent deterioration of the formulation. Antioxidants used may be free radical scavengers such as tocopherols, alkyl gallates, butylated hydroxyanisole, butylated hydroxytoluene, or reducing agents such as ascorbic acid and sodium metabisulfite, and antioxidant synergists such as citric acid, tartaric acid, and lecithin.

[0537] In some embodiments, the compositions are formulated as microemulsions. As used herein, “microemulsion” refers to a system of water, oil and amphiphile which is a single optically isotropic and thermodynamically stable liquid solution. Microemulsions also include thermodynamically stable, isotropically clear dispersions of two immiscible liquids that are stabilized by interfacial films of surface-active molecules.

[0538] A microemulsion may be defined as a system of water, oil and amphiphile which is a single optically isotropic and thermodynamically stable liquid solution (Rosoff, in Pharmaceutical Dosage Forms, Lieberman, Rieger and Banker (Eds.), 1988, Marcel Dekker, Inc., New York, N.Y., volume 1, p. 245). Typically microemulsions are systems that are prepared by first dispersing an oil in an aqueous surfactant solution and then adding a sufficient amount of a fourth component, generally an intermediate chain-length alcohol to form a transparent system. Therefore, microemulsions have also been described as thermodynamically stable, isotropically clear dispersions of two immiscible liquids that are stabilized by interfacial films of surface-active molecules (Leung and Shah, in: Controlled Release of Drugs: Polymers and Aggregate Systems, Rosoff, M., Ed., 1989, VCH Publishers, New York, pages 185-215). Microemulsions commonly are prepared via a combination of three to five components that include oil, water, surfactant, cosurfactant and electrolyte. Whether the microemulsion is of the water-in-oil (w/o) or an oil-in-water (o/w) type is dependent on the properties of the oil and surfactant used and on the structure and geometric packing of the polar heads and hydrocarbon tails of the surfactant molecules (Schott, in Remington's Pharmaceutical Sciences, Mack Publishing Co., Easton, Pa., 1985, p. 271).

[0539] The phenomenological approach utilizing phase diagrams has been extensively studied and has yielded a comprehensive knowledge, to one skilled in the art, of how to formulate microemulsions (Rosoff, in Pharmaceutical Dosage Forms, Lieberman, Rieger and Banker (Eds.), 1988, Marcel Dekker, Inc., New York, N.Y., volume 1, p. 245; Block, in Pharmaceutical Dosage Forms, Lieberman, Rieger and Banker (Eds.), 1988, Marcel Dekker, Inc., New York, N.Y., volume 1, p. 335). Compared to conventional emulsions, microemulsions offer the advantage of solubilizing water-insoluble drugs in a formulation of thermodynamically stable droplets that are formed spontaneously.

[0540] Surfactants used in the preparation of microemulsions include, but are not limited to, ionic surfactants, non-ionic surfactants, Brij 96, polyoxyethylene oleyl ethers, polyglycerol fatty acid esters, tetraglycerol monolaurate (ML310), tetraglycerol monooleate (MO310), hexaglycerol monooleate (PO310), hexaglycerol pentaoleate (PO500), decaglycerol monocaprate (MCA750), decaglycerol monooleate (MO750), decaglycerol sesquioleate (SO750), decaglycerol decaoleate (DAO750), alone or in combination with cosurfactants. The cosurfactant, usually a short-chain alcohol such as ethanol, 1-propanol, and 1-butanol, serves to increase the interfacial fluidity by penetrating into the surfactant film and consequently creating a disordered film because of the void space generated among surfactant molecules. Microemulsions may, however, be prepared without the use of cosurfactants and alcohol-free self-emulsifying microemulsion systems are known in the art. The aqueous phase may typically be, but is not limited to, water, an aqueous solution of the drug, glycerol, PEG300, PEG400, polyglycerols, propylene glycols, and derivatives of ethylene glycol. The oil phase may include, but is not limited to, materials such as Captex 300, Captex 355, Capmul MCM, fatty acid esters, medium chain (C8-C12) mono, di, and triglycerides, polyoxyethylated glyceryl fatty acid esters, fatty alcohols, polyglycolized glycerides, saturated polyglycolized C8-C10 glycerides, vegetable oils and silicone oil.

[0541] Microemulsions are particularly of interest from the standpoint of drug solubilization and the enhanced absorption of drugs. Lipid based microemulsions (both o/w and w/o) have been proposed to enhance the oral bioavailability of drugs, including peptides (Constantinides et al., Pharmaceutical Research, 1994, 11, 1385-1390; Ritschel, Meth. Find. Exp. Clin. Pharmacol., 1993, 13, 205). Microemulsions afford advantages of improved drug solubilization, protection of drug from enzymatic hydrolysis, possible enhancement of drug absorption due to surfactant-induced alterations in membrane fluidity and permeability, ease of preparation, ease of oral administration over solid dosage forms, improved clinical potency, and decreased toxicity (Constantinides et al., Pharmaceutical Research, 1994, 11, 1385; Ho et al., J. Pharm. Sci., 1996, 85, 138-143). Often microemulsions may form spontaneously when their components are brought together at ambient temperature. This may be particularly advantageous when formulating thermolabile drugs, peptides or dsRNAs. Microemulsions have also been effective in the transdermal delivery of active components in both cosmetic and pharmaceutical applications. It is expected that the microemulsion compositions and formulations of the present invention will facilitate the increased systemic absorption of dsRNAs and nucleic acids from the gastrointestinal tract, as well as improve the local cellular uptake of dsRNAs and nucleic acids.

[0542] Microemulsions of the present invention may also contain additional components and additives such as sorbitan monostearate (Grill 3), Labrasol, and penetration enhancers to improve the properties of the formulation and to enhance the absorption of the dsRNAs and nucleic acids of the present invention. Penetration enhancers used in the microemulsions of the present invention may be classified as belonging to one of five broad categories—surfactants, fatty acids, bile salts, chelating agents, and non-chelating non-surfactants (Lee et al., Critical Reviews in Therapeutic Drug Carrier Systems, 1991, p. 92). Each of these classes has been discussed above.

[0543] The application of emulsion formulations via dermatological, oral and parenteral routes and methods for their manufacture have been reviewed in the literature, for example see Idson, in Pharmaceutical Dosage Forms, Lieberman, Rieger and Banker (Eds.), 1988, Marcel Dekker, Inc., New York, N.Y., volume 1, p. 199; Rosoff, in Pharmaceutical Dosage Forms, Lieberman, Rieger and Banker (Eds.), 1988, Marcel Dekker, Inc., New York, N.Y., volume 1, p. 245; and Block, in Pharmaceutical Dosage Forms, Lieberman, Rieger and Banker (Eds.), 1988, Marcel Dekker, Inc., New York, N.Y., volume 1, p. 335, contents of which are herein incorporated by reference in their entirety.

[0544] The oligomeric compounds of the present invention can be prepared and formulated as lipid particles, e.g., formulated lipid particles (FLiPs) comprising (a) an oligonucleotide of the invention, where said oligonucleotide has been conjugated to a lipophile and (b) at least one lipid component, for example an emulsion, liposome, isolated lipoprotein, reconstituted lipoprotein or phospholipid, to which the conjugated oligonucleotide has been aggregated, admixed or associated. The stoichiometry of oligonucleotide to the lipid component can be 1:1. Alternatively the stoichiometry can be 1:many, many:1 or many:many, where many is two or more.

[0545] The FLiP can comprise triacylglycerols, phospholipids, glycerol and one or several lipid-binding proteins aggregated, admixed or associated via a lipophilic linker molecule with an oligonucleotide. Surprisingly, it has been found that due to said one or several lipid-binding proteins in combination with the above mentioned lipids, the FLiPs show affinity to liver, gut, kidney, steroidogenic organs, heart, lung and/or muscle tissue. These FLiPs can therefore serve as carrier for oligonucleotides to these tissues. For example, lipid-conjugated oligonucleotides, e.g., cholesterol-conjugated oligonucleotides, bind to HDL and LDL lipoprotein particles which mediate cellular uptake upon binding to their respective receptors thus directing oligonucleotide delivery into liver, gut, kidney and steroidogenic organs, see Wolfrum et al. Nature Biotech. (2007), 25:1145-1157.

[0546] The FLiP can be a lipid particle comprising 15-25% triacylglycerol, about 0.5-2% phospholipids and 1-3% glycerol, and one or several lipid-binding proteins. FLiPs can be a lipid particle having about 15-25% triacylglycerol, about 1-2% phospholipids, about 2-3% glycerol, and one or several lipid-binding proteins. In some embodiments, the lipid particle comprises about 20% triacylglycerol, about 1.2% phospholipids and about 2.25% glycerol, and one or several lipid-binding proteins.

[0547] Another suitable lipid component for FLiPs is lipoproteins, for example isolated lipoproteins or more preferably reconstituted lipoproteins. Exemplary lipoproteins include chylomicrons, VLDL (Very Low Density Lipoproteins), IDL (Intermediate Density Lipoproteins), LDL (Low Density Lipoproteins) and HDL (High Density Lipoproteins). Methods of producing reconstituted lipoproteins are known in the art, for example see A. Jones, Experimental Lung Res. 6, 255-270 (1984), U.S. Pat. Nos. 4,643,988 and 5,128,318, PCT publication WO87/02062, Canadian Pat. No. 2,138,925. Other methods of producing reconstituted lipoproteins, especially for apolipoproteins A-I, A-II, A-IV, apoC and apoE have been described in A. Jonas, Methods in Enzymology 128, 553-582 (1986) and G. Franceschini et al. J. Biol. Chem., 260(30), 16321-25 (1985).

[0548] One preferred lipid component for FLiP is Intralipid. Intralipid® is a brand name for the first safe fat emulsion for human use. Intralipid® 20% (a 20% intravenous fat emulsion) is made up of 20% soybean oil, 1.2% egg yolk phospholipids, 2.25% glycerin, and water for injection. It is further within the present invention that other suitable oils, such as safflower oil, can serve to produce the lipid component of the FLiP.

[0549] FLiP can range in size from about 20-50 nm or about 30-50 nm, e.g., about 35 nm or about 40 nm. In some embodiments, the FLiP has a particle size of at least about 100 nm. FLiPs can alternatively be between about 100-150 nm, e.g., about 110 nm, about 120 nm, about 130 nm, or about 140 nm, whether characterized as liposome- or emulsion-based. Multiple FLiPs can also be aggregated and delivered together, therefore the size can be larger than 100 nm.

[0550] The process for making the lipid particles comprises the steps of: (a) mixing a lipid components with one or several lipophile (e.g. cholesterol) conjugated oligonucleotides that can be chemically modified; and (b) fractionating this mixture. In some embodiments, the process comprises the additional step of selecting the fraction with particle size of 30-50 nm, preferably of about 40 nm in size.

[0551] Some exemplary lipid particle formulations amenable to the invention are described in U.S. patent application Ser. No. 12/412,206, filed Mar. 26, 2009, content of which is herein incorporated by reference in its entirety.

[0552] In some embodiments, the oligomeric compounds can be formulated in yeast cell wall particles (“YCWP”). A yeast cell wall particle comprises an extracted yeast cell wall exterior and a core, the core comprising a payload (e.g., oligonucleotides). Exterior of the particle comprises yeast glucans (e.g. beta glucans, beta-1,3-glucans, beta-1,6-glucans), yeast mannans, or combinations thereof. Yeast cell wall particles are typically spherical particles about 1-4 μm in diameter.

[0553] Preparation of yeast cell wall particles is known in the art, and is described, for example in U.S. Pat. Nos. 4,992,540; 5,082,936; 5,028,703; 5,032,401; 5,322,841; 5,401,727; 5,504,079; 5,607,677; 5,741,495; 5,830,463; 5,968,811; 6,444,448; and 6,476,003, U.S. Pat. App. Pub. Nos. 2003/0216346 and 2004/0014715, and Int. App. Pub. No. WO 2002/12348, contents of which are herein incorporated by reference in their entirety. Applications of yeast cell like particles for drug delivery are described, for example in U.S. Pat. Nos. 5,032,401; 5,607,677; 5,741,495; and 5,830,463, and U.S. Pat. Pub Nos. 2005/0281781 and 2008/0044438, contents of which are herein incorporated by reference in their entirety. U.S. Pat. App. Pub. No. 2009/0226528, contents of which are herein incorporated by reference, describes formulation of nucleic acids with yeast cell wall particles for delivery of oligonucleotide to cells.

[0554] Exemplary formulations for oligomeric compounds are described in U.S. Pat. Nos. 4,897,355; 4,394,448; 4,235,871; 4,231,877; 4,224,179; 4,753,788; 4,673,567; 4,247,411; 4,814,270; 5,567,434; 5,552,157; 5,565,213; 5,738,868; 5,795,587; 5,922,859; 6,077,663; 7,906,484; and 8,642,076; PCT Publication No. WO2009/132131 and U.S. Pat. Pub. Nos. 2006/0240093, 2007/0135372, 2011/0117125, 2009/0291131, 2012/0316220, 2009/0163705 and 2013/0129785, contents of all of which is herein incorporated by reference in its entirety. Behr (1994) Bioconjugate Chem. 5:382-389, and Lewis et al. (1996) PNAS 93:3176-3181), also describe formulations for oligonucleotides that are amenable to the invention, contents of which are herein incorporated by reference in their entirety.

siRNA

[0555] As used herein, the term “siRNA” refers to an agent that mediates the targeted cleavage of an RNA transcript. These agents associate with a cytoplasmic multi-protein complex known as RNAi-induced silencing complex (RISC). Agents that are effective in inducing RNA interference are also referred to as siRNA, RNAi agent, or iRNA agent, herein. As used herein, the term siRNA includes microRNAs and pre-microRNAs.

[0556] As used herein, the term “siRNA” refers to an agent that mediates the targeted cleavage of an RNA transcript. These agents associate with a cytoplasmic multi-protein complex known as RNAi-induced silencing complex (RISC). Agents that are effective in inducing RNA interference are also referred to as siRNA, dsRNA, RNAi agent, or iRNA agent herein.

[0557] As used herein, the terms “siRNA activity” and “RNAi activity” refer to gene silencing by an siRNA.

[0558] As used herein, “gene silencing” by a RNA interference molecule refers to a decrease in the mRNA level in a cell for a target gene by at least about 5%, at least about 10%, at least about 20%, at least about 30%, at least about 40%, at least about 50%, at least about 60%, at least about 70%, at least about 80%, at least about 90%, at least about 95%, at least about 99% up to and including 100%, and any integer in between of the mRNA level found in the cell without the presence of the miRNA or RNA interference molecule. In one preferred embodiment, the mRNA levels are decreased by at least about 70%, at least about 80%, at least about 90%, at least about 95%, at least about 99%, up to and including 100% and any integer in between 5% and 100%.”

[0559] As used herein the term “modulate gene expression” means that expression of the gene, or level of RNA molecule or equivalent RNA molecules encoding one or more proteins or protein subunits is up regulated or down regulated, such that expression, level, or activity is greater than or less than that observed in the absence of the modulator. For example, the term “modulate” can mean “inhibit,” but the use of the word “modulate” is not limited to this definition.

[0560] As used herein, gene expression modulation happens when the expression of the gene, or level of RNA molecule or equivalent RNA molecules encoding one or more proteins or protein subunits is at least 5%, 10%, 20%, 30%, 40%, 50%, 60%, 70%, 80%, 90%, 100%, 2-fold, 3-fold, 4-fold, 5-fold or more different from that observed in the absence of the siRNA, e.g., RNAi agent. The % and/or fold difference can be calculated relative to the control or the non-control, for example,

$$\% difference = \frac{[ expression with siRNA - expression without siRNA ]}{expression without siRNA} \\ or \\ \% difference = \frac{[ expression with siRNA - expression without siRNA ]}{expression without siRNA}$$

[0561] As used herein, the term “inhibit”, “down-regulate”, or “reduce” in relation to gene expression, means that the expression of the gene, or level of RNA molecules or equivalent RNA molecules encoding one or more proteins or protein subunits, or activity of one or more proteins or protein subunits, is reduced below that observed in the absence of modulator. The gene expression is down-regulated when expression of the gene, or level of RNA molecules or equivalent RNA molecules encoding one or more proteins or protein subunits, or activity of one or more proteins or protein subunits, is reduced at least 10% lower relative to a corresponding non-modulated control, and preferably at least 10%, 20%, 30%, 40%, 50%, 60%, 70%, 80%, 90%, 95%, 98%, 99% or most preferably, 100% (i.e., no gene expression).

[0562] As used herein, the term “increase” or “up-regulate” in relation to gene expression, means that the expression of the gene, or level of RNA molecules or equivalent RNA molecules encoding one or more proteins or protein subunits, or activity of one or more proteins or protein subunits, is increased above that observed in the absence of modulator. The gene expression is up-regulated when expression of the gene, or level of RNA molecules or equivalent RNA molecules encoding one or more proteins or protein subunits, or activity of one or more proteins or protein subunits, is increased at least 10% relative to a corresponding non-modulated control, and preferably at least 10%, 20%, 30%, 40%, 50%, 60%, 70%, 80%, 90%, 95%, 98%, 100%, 1.1-fold, 1.25-fold, 1.5-fold, 1.75-fold, 2-fold, 3-fold, 4-fold, 5-fold, 10-fold, 50-fold, 100-fold or more.

[0563] The term “increased” or “increase” as used herein generally means an increase by a statically significant amount; for the avoidance of any doubt, “increased” means an increase of at least 10% as compared to a reference level, for example an increase of at least about 20%, or at least about 30%, or at least about 40%, or at least about 50%, or at least about 60%, or at least about 70%, or at least about 80%, or at least about 90% or up to and including a 100% increase or any increase between 10-100% as compared to a reference level, or at least about a 2-fold, or at least about a 3-fold, or at least about a 4-fold, or at least about a 5-fold or at least about a 10-fold increase, or any increase between 2-fold and 10-fold or greater as compared to a reference level.

[0564] The term “reduced” or “reduce” as used herein generally means a decrease by a statistically significant amount. However, for avoidance of doubt, “reduced” means a decrease by at least 10% as compared to a reference level, for example a decrease by at least about 20%, or at least about 30%, or at least about 40%, or at least about 50%, or at least about 60%, or at least about 70%, or at least about 80%, or at least about 90% or up to and including a 100% decrease (i.e. absent level as compared to a reference sample), or any decrease between 10-100% as compared to a reference level.

[0565] The skilled person is well aware that double-stranded oligonucleotides comprising a duplex structure of between 20 and 23, but specifically 21, base pairs have been hailed as particularly effective in inducing RNA interference (Elbashir et al., EMBO 2001, 20:6877-6888). However, others have found that shorter or longer double-stranded oligonucleotides can be effective as well.

[0566] The double-stranded oligonucleotides comprise two oligonucleotide strands that are sufficiently complementary to hybridize to form a duplex structure. Generally, the duplex structure is between 15 and 30, more generally between 18 and 25, yet more generally between 19 and 24, and most generally between 19 and 21 base pairs in length. In some embodiments, longer double-stranded oligonucleotides of between 25 and 30 base pairs in length are preferred. In some embodiments, shorter double-stranded oligonucleotides of between 10 and 15 base pairs in length are preferred. In another embodiment, the double-stranded oligonucleotide is at least 21 nucleotides long.

[0567] In some embodiments, the double-stranded oligonucleotide comprises a sense strand and an antisense strand, wherein the antisense RNA strand has a region of complementarity which is complementary to at least a part of a target sequence, and the duplex region is 14-30 nucleotides in length. Similarly, the region of complementarity to the target sequence is between 14 and 30, more generally between 18 and 25, yet more generally between 19 and 24, and most generally between 19 and 21 nucleotides in length.

[0568] The phrase “antisense strand” as used herein, refers to an oligomeric compound that is substantially or 100% complementary to a target sequence of interest. The phrase “antisense strand” includes the antisense region of both oligomeric compounds that are formed from two separate strands, as well as unimolecular oligomeric compounds that are capable of forming hairpin or dumbbell type structures. The terms “antisense strand” and “guide strand” are used interchangeably herein.

[0569] The phrase “sense strand” refers to an oligomeric compound that has the same nucleoside sequence, in whole or in part, as a target sequence such as a messenger RNA or a sequence of DNA. The terms “sense strand” and “passenger strand” are used interchangeably herein.

[0570] By “specifically hybridizable” and “complementary” is meant that a nucleic acid can form hydrogen bond(s) with another nucleic acid sequence by either traditional Watson-Crick or other non-traditional types. In reference to the nucleic molecules of the present invention, the binding free energy for a nucleic acid molecule with its complementary sequence is sufficient to allow the relevant function of the nucleic acid to proceed, e.g., RNAi activity. Determination of binding free energies for nucleic acid molecules is well known in the art (see, e.g., Turner et al, 1987, CSH Symp. Quant. Biol. LII pp. 123-133; Frier et al., 1986, Proc. Nat. Acad. Sci. USA 83:9373-9377; Turner et al., 1987, J. Am. Chem. Soc. 109:3783-3785). A percent complementarity indicates the percentage of contiguous residues in a nucleic acid molecule that can form hydrogen bonds (e.g., Watson-Crick base pairing) with a second nucleic acid sequence (e.g., 5, 6, 7, 8, 9, 10 out of 10 being 50%, 60%, 70%, 80%, 90%, and 100% complementary). “Perfectly complementary” or 100% complementarity means that all the contiguous residues of a nucleic acid sequence will hydrogen bond with the same number of contiguous residues in a second nucleic acid sequence. Less than perfect complementarity refers to the situation in which some, but not all, nucleoside units of two strands can hydrogen bond with each other. “Substantial complementarity” refers to polynucleotide strands exhibiting 90% or greater complementarity, excluding regions of the polynucleotide strands, such as overhangs, that are selected so as to be noncomplementary. Specific binding requires a sufficient degree of complementarity to avoid non-specific binding of the oligomeric compound to non-target sequences under conditions in which specific binding is desired, i.e., under physiological conditions in the case of in vivo assays or therapeutic treatment, or in the case of in vitro assays, under conditions in which the assays are performed. The non-target sequences typically differ by at least 5 nucleotides.

[0571] The term “off-target” and the phrase “off-target effects” refer to any instance in which an siRNA against a given target causes an unintended affect by interacting either directly or indirectly with another mRNA sequence, a DNA sequence or a cellular protein or other moiety. For example, an “off-target effect” may occur when there is a simultaneous degradation of other transcripts due to partial homology or complementarity between that other transcript and the sense and/or antisense strand of an siRNA.

[0572] In some embodiments, the double-stranded region of a double-stranded oligomeric compound is equal to or at least, 10, 11, 12, 13, 14, 15, 16, 17, 18, 19, 20, 21, 22, 23, 23, 24, 25, 26, 27, 28, 29, or 30 nucleotide pairs in length.

[0573] In some embodiments, the antisense strand of a double-stranded oligomeric compound is equal to or at least 14, 15, 16, 17, 18, 19, 20, 21, 22, 23, 23, 24, 25, 26, 27, 28, 29, or 30 nucleotides in length.

[0574] In some embodiments, the sense strand of a double-stranded oligomeric compound is equal to or at least 10, 11, 12, 13, 14, 15, 16, 17, 18, 19, 20, 21, 22, 23, 23, 24, 25, 26, 27, 28, 29, or 30 nucleotides in length.

[0575] In some embodiments, one strand has at least one stretch of 1-5 single-stranded nucleotides in the double-stranded region. By “stretch of single-stranded nucleotides in the double-stranded region” is meant that there is present at least one nucleotide base pair at both ends of the single-stranded stretch. In some embodiments, both strands have at least one stretch of 1-5 (e.g., 1, 2, 3, 4, or 5) single-stranded nucleotides in the double stranded region. When both strands have a stretch of 1-5 (e.g., 1, 2, 3, 4, or 5) single-stranded nucleotides in the double stranded region, such single-stranded nucleotides can be opposite to each other (e.g., a stretch of mismatches) or they can be located such that the second strand has no single-stranded nucleotides opposite to the single-stranded oligonucleotides of the first strand and vice versa (e.g., a single-stranded loop). In some embodiments, the single-stranded nucleotides are present within 8 nucleotides from either end, for example 8, 7, 6, 5, 4, 3, or 2 nucleotide from either the 5′ or 3′ end of the region of complementarity between the two strands.

[0576] In some embodiments, each strand of the double-stranded oligonucleotide has a ZXY structure, such as is described in PCT Publication No. 2004080406, content of which is hereby incorporated in its entireties.

[0577] In certain embodiment, the two strands of double-stranded oligomeric compound can be linked together. The two strands can be linked to each other at both ends, or at one end only. By linking at one end is meant that 5′-end of first strand is linked to the 3′-end of the second strand or 3′-end of first strand is linked to 5′-end of the second strand. When the two strands are linked to each other at both ends, 5′-end of first strand is linked to 3′-end of second strand and 3′-end of first strand is linked to 5′-end of second strand. The two strands can be linked together by an oligonucleotide linker including, but not limited to, (N)ₙ; wherein N is independently a modified or unmodified nucleotide and n is 3-23. In some embodiments, n is 3-10, e.g., 3, 4, 5, 6, 7, 8, 9, or 10. In some embodiments, the oligonucleotide linker is selected from the group consisting of GNRA, (G)₄, (U)₄, and (dT)₄, wherein N is a modified or unmodified nucleotide and R is a modified or unmodified purine nucleotide. Some of the nucleotides in the linker can be involved in base-pair interactions with other nucleotides in the linker. The two strands can also be linked together by a non-nucleosidic linker, e.g. a linker described herein. It will be appreciated by one of skill in the art that any oligonucleotide chemical modifications or variations describe herein can be used in the oligonucleotide linker.

[0578] Hairpin and dumbbell type oligomeric compounds will have a duplex region equal to or at least 14, 15, 15, 16, 17, 18, 19, 29, 21, 22, 23, 24, or 25 nucleotide pairs. The duplex region can be equal to or less than 200, 100, or 50, in length. In some embodiments, ranges for the duplex region are 15-30, 17 to 23, 19 to 23, and 19 to 21 nucleotides pairs in length.

[0579] The hairpin oligomeric compounds can have a single strand overhang or terminal unpaired region, in some embodiments at the 3′, and in some embodiments on the antisense side of the hairpin. In some embodiments, the overhangs are 1-4, more generally 2-3 nucleotides in length. The hairpin oligomeric compounds that can induce RNA interference are also referred to as “shRNA” herein.

[0580] In certain embodiments, two oligomeric strands specifically hybridize when there is a sufficient degree of complementarity to avoid non-specific binding of the antisense compound to non-target nucleic acid sequences under conditions in which specific binding is desired, i.e., under physiological conditions in the case of in vivo assays or therapeutic treatment, and under conditions in which assays are performed in the case of in vitro assays.

[0581] As used herein, “stringent hybridization conditions” or “stringent conditions” refers to conditions under which an antisense compound will hybridize to its target sequence, but to a minimal number of other sequences. Stringent conditions are sequence-dependent and will be different in different circumstances, and “stringent conditions” under which antisense compounds hybridize to a target sequence are determined by the nature and composition of the antisense compounds and the assays in which they are being investigated.

[0582] It is understood in the art that incorporation of nucleotide affinity modifications may allow for a greater number of mismatches compared to an unmodified compound. Similarly, certain oligonucleotide sequences may be more tolerant to mismatches than other oligonucleotide sequences. One of ordinary skill in the art is capable of determining an appropriate number of mismatches between oligonucleotides, or between an oligonucleotide and a target nucleic acid, such as by determining melting temperature (Tm). Tm or ΔTm can be calculated by techniques that are familiar to one of ordinary skill in the art. For example, techniques described in Freier et al. (Nucleic Acids Research, 1997, 25, 22: 4429-4443) allow one of ordinary skill in the art to evaluate nucleotide modifications for their ability to increase the melting temperature of an RNA:DNA duplex.

### Modulation of Target Expression

[0583] In certain embodiments, a target nucleic acid is a mRNA. In certain such embodiments, siRNAs are designed to modulate that target mRNA or its expression. In certain embodiments, designing an antisense compound to a target nucleic acid molecule can be a multistep process. Typically the process begins with the identification of a target protein, the activity of which is to be modulated, and then identifying the nucleic acid the expression of which yields the target protein. In certain embodiments, designing of an antisense compound results in an antisense compound that is hybridizable to the targeted nucleic acid molecule. In certain embodiments, the antisense compound is an antisense oligonucleotide or antisense oligonucleoside. In certain embodiments, an antisense compound and a target nucleic acid are complementary to one another. In certain such embodiments, an antisense compound is perfectly complementary to a target nucleic acid. In certain embodiments, an antisense compound includes one mismatch. In certain embodiments, an antisense compound includes two mismatches. In certain embodiments, an antisense compound includes three or more mismatches.

[0584] Modulation of expression of a target nucleic acid can be achieved through alteration of any number of nucleic acid functions. In certain embodiments, the functions of RNA to be modulated include, but are not limited to, translocation functions, which include, but are not limited to, translocation of the RNA to a site of protein translation, translocation of the RNA to sites within the cell which are distant from the site of RNA synthesis, and translation of protein from the RNA. RNA processing functions that can be modulated include, but are not limited to, splicing of the RNA to yield one or more RNA species, capping of the RNA, 3′ maturation of the RNA and catalytic activity or complex formation involving the RNA which may be engaged in or facilitated by the RNA. Modulation of expression can result in the increased level of one or more nucleic acid species or the decreased level of one or more nucleic acid species, either temporally or by net steady state level. Thus, in one embodiment modulation of expression can mean increase or decrease in target RNA or protein levels. In another embodiment modulation of expression can mean an increase or decrease of one or more RNA splice products, or a change in the ratio of two or more splice products.

[0585] In certain embodiments, the siRNA is a conjugated siRNA. As used herein, the term “conjugated siRNA” refers to an RNAi agent that is conjugated with a ligand. For Example, an RNAi agent conjugated with a ligand described herein.

[0586] In some other embodiments, the siRNA is an unconjugated siRNA. As used herein, the term “unconjugated siRNA” refers to an RNAi agent that is not conjugated with a ligand, e.g., a ligand described herein.

[0587] In one aspect, the invention relates to a double-stranded RNA (dsRNA) agent, i.e., siRNA, for inhibiting the expression of a target gene. The dsRNA agent comprises a sense strand and an antisense strand, each strand having 14 to 40 nucleotides. The dsRNA agent is represented by formula (I).

[chemical structure]

[0588] In formula (I), B1, B2, B3, B1′, B2′, B3′, and B4′ each are independently a nucleotide containing a modification selected from the group consisting of 2′-O-alkyl, 2′-substituted alkoxy, 2′-substituted alkyl, 2′-halo, ENA, and BNA/LNA. In one embodiment, B1, B2, B3, B1′, B2′, B3′, and B4′ each contain 2′-OMe modifications.

[0589] C1 is a thermally destabilizing nucleotide placed at a site opposite to the seed region of the antisense strand (i.e., at positions 2-8 of the 5′-end of the antisense strand). For example, C1 is at a position of the sense strand that pairs with a nucleotide at positions 2-8 of the 5′-end of the antisense strand. C1 nucleotide bears the thermally destabilizing modification which can include abasic modification; mismatch with the opposing nucleotide in the duplex; and sugar modification such as 2′-deoxy modification or acyclic nucleotide e.g., unlocked nucleic acids (UNA) or glycerol nucleic acid (GNA). In one embodiment, C1 has thermally destabilizing modification selected from the group consisting of: i) mismatch with the opposing nucleotide in the antisense strand; ii) abasic modification selected from the group consisting of:

[chemical structure]

and iii) sugar modification selected from the group consisting of:

[chemical structure]

wherein B is a modified or unmodified nucleobase, R¹ and R² independently are H, halogen, OR₃, or alkyl; and R₃ is H, alkyl, cycloalkyl, aryl, aralkyl, heteroaryl or sugar. In one embodiment, the thermally destabilizing modification in C1 is a mismatch selected from the group consisting of G:G, G:A, G:U, G:T, A:A, A:C, C:C, C:U, C:T, U:U, T:T, and U:T; and optionally, at least one nucleobase in the mismatch pair is a 2′-deoxy nucleobase. In one example, the thermally destabilizing modification in C1 is GNA or

[chemical structure]

[0590] T1, T1′, T2′, and T3′ each independently represent a nucleotide comprising a modification providing the nucleotide a steric bulk that is less or equal to the steric bulk of a 2′-OMe modification. The modification can be at the 2′ position of a ribose sugar of the nucleotide, or a modification to a non-ribose nucleotide, acyclic nucleotide, or the backbone of the nucleotide that is similar or equivalent to the 2′ position of the ribose sugar, and provides the nucleotide a steric bulk that is less than or equal to the steric bulk of a 2′-OMe modification. For example, T1, T1′, T2′, and T3′ are each independently selected from DNA, RNA, LNA, 2′-F, and 2′-F-5′-methyl. In one embodiment, T1 is DNA. In one embodiment, T1′ is DNA, RNA or LNA. In one embodiment, T2′ is DNA or RNA. In one embodiment, T3′ is DNA or RNA.
[0591] n¹, n³, and q¹ are independently 4 to 15 nucleotides in length.
[0592] n⁵, q³, and q⁷ are independently 1-6 nucleotide(s) in length.
[0593] n⁴, q², and q⁶ are independently 1-3 nucleotide(s) in length.
[0594] q⁵ is independently 0-10 nucleotide(s) in length.
[0595] n² and q⁴ are independently 0-3 nucleotide(s) in length.

[0596] Alternatively, n⁴ is 0-3 nucleotide(s) in length.

[0597] In one embodiment, n⁴ can be 0. In one example, n⁴ is 0, and q² and q⁶ are 1. In another example, n⁴ is 0, and q² and q⁶ are 1, with two phosphorothioate internucleotide linkage modifications within position 1-5 of the sense strand (counting from the 5′-end of the sense strand), and two phosphorothioate internucleotide linkage modifications at positions 1 and 2 and two phosphorothioate internucleotide linkage modifications within positions 18-23 of the antisense strand (counting from the 5′-end of the antisense strand).

[0598] In one embodiment, n⁴, q², and q⁶ are each 1.

[0599] In one embodiment, n², n⁴, q², q⁴, and q⁶ are each 1.

[0600] In one embodiment, C1 is at position 14-17 of the 5′-end of the sense strand, when the sense strand is 19-22 nucleotides in length, and n⁴ is 1.

[0601] In one embodiment, T3′ starts at position 2 from the 5′ end of the antisense strand. In one example, T3′ is at position 2 from the 5′ end of the antisense strand and q⁶ is equal to 1.

[0602] In one embodiment, T1′ starts at position 14 from the 5′ end of the antisense strand. In one example, T1′ is at position 14 from the 5′ end of the antisense strand and q² is equal to 1.

[0603] In one embodiment, T1′ and T3′ are separated by 11 nucleotides in length (i.e. not counting the T1′ and T3′ nucleotides.

[0604] In one embodiment, T1′ is at position 14 from the 5′ end of the antisense strand. In one example, T1′ is at position 14 from the 5′ end of the antisense strand and q² is equal to 1, and the modification at the 2′ position or positions in a non-ribose, acyclic or backbone that provide less steric bulk than a 2′-OMe ribose.

[0605] In one embodiment, T3′ is at position 2 from the 5′ end of the antisense strand. In one example, T3′ is at position 2 from the 5′ end of the antisense strand and q⁶ is equal to 1, and the modification at the 2′ position or positions in a non-ribose, acyclic or backbone that provide less than or equal to steric bulk than a 2′-OMe ribose.

[0606] In one embodiment, T1 is at cleavage site of the sense strand. In one example, T1 is at position 11 from the 5′ end of the sense strand, when the sense strand is 19-22 nucleotides in length, and n² is 1.

[0607] In one embodiment, T2′ starts at position 6 from the 5′ end of the antisense strand. In one example, T2′ is at positions 6-10 from the 5′ end of the antisense strand, and q⁴ is 1.

[0608] In one embodiment, B1 is 2′-OMe or 2′-F, n^{t} is 8, T1 is 2′F, n² is 3, B2 is 2′-OMe, n³ is 7, n⁴ is 0, B3 is 2′OMe, n⁵ is 3, B1′ is 2′-OMe or 2′-F, q¹ is 9, T1′ is 2′-F, q² is 1, B2′ is 2′-OMe or 2′-F, q³ is 4, T2′ is 2′-F, q⁴ is 2, B3′ is 2′-OMe or 2′-F, q⁵ is 5, T3′ is 2′-F, q⁶ is 1, B4′ is 2′-OMe, and q⁷ is 1.

[0609] In one embodiment, B1 is 2′-OMe or 2′-F, n^{t} is 8, T1 is 2′F, n² is 3, B2 is 2′-OMe, n³ is 7, n⁴ is 0, B3 is 2′-OMe, n⁵ is 3, B1′ is 2′-OMe or 2′-F, q¹ is 9, T1′ is 2′-F, q² is 1, B2′ is 2′-OMe or 2′-F, q³ is 4, T2′ is 2′-F, q⁴ is 2, B3′ is 2′-OMe or 2′-F, q⁵ is 5, T3′ is 2′-F, q⁶ is 1, B4′ is 2′-OMe, and q⁷ is 1; with two phosphorothioate internucleotide linkage modifications within position 1-5 of the sense strand (counting from the 5′-end of the sense strand), and two phosphorothioate internucleotide linkage modifications at positions 1 and 2 and two phosphorothioate internucleotide linkage modifications within positions 18-23 of the antisense strand (counting from the 5′-end of the antisense strand).

[0610] In one embodiment, B1 is 2′-OMe or 2′-F, n^{t} is 8, T1 is 2′F, n² is 3, B2 is 2′-OMe, n³ is 7, n⁴ is 0, B3 is 2′-OMe, n⁵ is 3, B1′ is 2′-OMe or 2′-F, q¹ is 9, T1′ is 2′-F, q² is 1, B2′ is 2′-OMe or 2′-F, q³ is 4, q⁴ is 0, B3′ is 2′-OMe or 2′-F, q⁵ is 7, T3′ is 2′-F, q⁶ is 1, B4′ is 2′-OMe, and q⁷ is 1.

[0611] In one embodiment, B1 is 2′-OMe or 2′-F, n^{t} is 8, T1 is 2′F, n² is 3, B2 is 2′-OMe, n³ is 7, n⁴ is 0, B3 is 2′-OMe, n⁵ is 3, B1′ is 2′-OMe or 2′-F, q¹ is 9, T1′ is 2′-F, q² is 1, B2′ is 2′-OMe or 2′-F, q³ is 4, q⁴ is 0, B3′ is 2′-OMe or 2′-F, q⁵ is 7, T3′ is 2′-F, q⁶ is 1, B4′ is 2′-OMe, and q⁷ is 1; with two phosphorothioate internucleotide linkage modifications within position 1-5 of the sense strand (counting from the 5′-end), and two phosphorothioate internucleotide linkage modifications at positions 1 and 2 and two phosphorothioate internucleotide linkage modifications within positions 18-23 of the antisense strand (counting from the 5′-end).

[0612] In one embodiment, B1 is 2′-OMe or 2′-F, n^{t} is 8, T1 is 2′F, n² is 3, B2 is 2′-OMe, n³ is 7, n⁴ is 0, B3 is 2′OMe, n⁵ is 3, B1′ is 2′-OMe or 2′-F, q¹ is 9, T1′ is 2′-F, q² is 1, B2′ is 2′-OMe or 2′-F, q³ is 4, T2′ is 2′-F, q⁴ is 2, B3′ is 2′-OMe or 2′-F, q⁵ is 5, T3′ is 2′-F, q⁶ is 1, B4′ is 2′-F, and q⁷ is 1.

[0613] In one embodiment, B1 is 2′-OMe or 2′-F, n^{t} is 8, T1 is 2′F, n² is 3, B2 is 2′-OMe, n³ is 7, n⁴ is 0, B3 is 2′-OMe, n⁵ is 3, B1′ is 2′-OMe or 2′-F, q¹ is 9, T1′ is 2′-F, q² is 1, B2′ is 2′-OMe or 2′-F, q³ is 4, T2′ is 2′-F, q⁴ is 2, B3′ is 2′-OMe or 2′-F, q⁵ is 5, T3′ is 2′-F, q⁶ is 1, B4′ is 2′-F, and q⁷ is 1; with two phosphorothioate internucleotide linkage modifications within position 1-5 of the sense strand (counting from the 5′-end of the sense strand), and two phosphorothioate internucleotide linkage modifications at positions 1 and 2 and two phosphorothioate internucleotide linkage modifications within positions 18-23 of the antisense strand (counting from the 5′-end of the antisense strand).

[0614] In one embodiment, B1 is 2′-OMe or 2′-F, n^{t} is 8, T1 is 2′F, n² is 3, B2 is 2′-OMe, n³ is 7, n⁴ is 0, B3 is 2′-OMe, n⁵ is 3, B1′ is 2′-OMe or 2′-F, q¹ is 9, T1′ is 2′-F, q² is 1, B2′ is 2′-OMe or 2′-F, q³ is 4, q⁴ is 0, B3′ is 2′-OMe or 2′-F, q⁵ is 7, T3′ is 2′-F, q⁶ is 1, B4′ is 2′-F, and q⁷ is 1.

[0615] In one embodiment, B1 is 2′-OMe or 2′-F, n^{t} is 8, T1 is 2′F, n² is 3, B2 is 2′-OMe, n³ is 7, n⁴ is 0, B3 is 2′-OMe, n⁵ is 3, B1′ is 2′-OMe or 2′-F, q¹ is 9, T1′ is 2′-F, q² is 1, B2′ is 2′-OMe or 2′-F, q³ is 4, q⁴ is 0, B3′ is 2′-OMe or 2′-F, q⁵ is 7, T3′ is 2′-F, q⁶ is 1, B4′ is 2′-F, and q⁷ is 1; with two phosphorothioate internucleotide linkage modifications within position 1-5 of the sense strand (counting from the 5′-end of the sense strand), and two phosphorothioate internucleotide linkage modifications at positions 1 and 2 and two phosphorothioate internucleotide linkage modifications within positions 18-23 of the antisense strand (counting from the 5′-end of the antisense strand).

[0616] In one embodiment, 100%, 95%, 90%, 85%, 80%, 75%, 70%, 65%, 60%, 55%, 50%, 45%, 40%, 35% or 30% of the dsRNA agent of the invention is modified.

[0617] In one embodiment, each of the sense and antisense strands of the dsRNA agent is independently modified with acyclic nucleotides, LNA, HNA, CeNA, 2′-methoxyethyl, 2′-O-methyl, 2′-O-allyl, 2′-C-allyl, 2′-deoxy, 2′-fluoro, 2′-O—N-methylacetamido (2′-O-NMA), a 2′-O-dimethylaminoethoxyethyl (2′-O-DMAEOE), 2′-O-aminopropyl (2′-O-AP), or 2′-ara-F.

[0618] In one embodiment, each of the sense and antisense strands of the dsRNA agent contains at least two different modifications.

[0619] In one embodiment, the dsRNA agent of Formula (I) further comprises 3′ and/or 5′ overhang(s) of 1-10 nucleotides in length. In one example, dsRNA agent of formula (I) comprises a 3′ overhang at the 3′-end of the antisense strand and a blunt end at the 5′-end of the antisense strand. In another example, the dsRNA agent has a 5′ overhang at the 5′-end of the sense strand.

[0620] In one embodiment, the dsRNA agent of the invention does not contain any 2′-F modification.

[0621] In one embodiment, the sense strand and/or antisense strand of the dsRNA agent comprises one or more blocks of phosphorothioate or methylphosphonate internucleotide linkages. In one example, the sense strand comprises one block of two phosphorothioate or methylphosphonate internucleotide linkages. In one example, the antisense strand comprises two blocks of two phosphorothioate or methylphosphonate internucleotide linkages. For example, the two blocks of phosphorothioate or methylphosphonate internucleotide linkages are separated by 16-18 phosphate internucleotide linkages.

[0622] In one embodiment, each of the sense and antisense strands of the dsRNA agent has 15-30 nucleotides. In one example, the sense strand has 19-22 nucleotides, and the antisense strand has 19-25 nucleotides. In another example, the sense strand has 21 nucleotides, and the antisense strand has 23 nucleotides.

[0623] In one embodiment, the nucleotide at position 1 of the 5′-end of the antisense strand in the duplex is selected from the group consisting of A, dA, dU, U, and dT. In one embodiment, at least one of the first, second, and third base pair from the 5′-end of the antisense strand is an AU base pair.

[0624] In one embodiment, the antisense strand of the dsRNA agent of the invention is 100% complementary to a target RNA to hybridize thereto and inhibits its expression through RNA interference. In another embodiment, the antisense strand of the dsRNA agent of the invention is at least 95%, at least 90%, at least 85%, at least 80%, at least 75%, at least 70%, at least 65%, at least 60%, at least 55%, or at least 50% complementary to a target RNA.

[0625] In one aspect, the invention relates to a dsRNA agent capable of inhibiting the expression of a target gene. The dsRNA agent comprises a sense strand and an antisense strand, each strand having 14 to 40 nucleotides. The sense strand contains at least one thermally destabilizing nucleotide, wherein at at least one said thermally destabilizing nucleotide occurs at or near the site that is opposite to the seed region of the antisense strand (i.e. at position 2-8 of the 5′-end of the antisense strand), For example, the thermally destabilizing nucleotide occurs between positions 14-17 of the 5′-end of the sense strand when the sense strand is 21 nucleotides in length. The antisense strand contains at least two modified nucleic acids that are smaller than a sterically demanding 2′-OMe modification. Preferably, the two modified nucleic acids that is smaller than a sterically demanding 2′-OMe are separated by 11 nucleotides in length. For example, the two modified nucleic acids are at positions 2 and 14 of the 5′end of the antisense strand.

[0626] In one embodiment, the sense strand sequence of the dsRNA agent is represented by formula (Is):

[chemical structure]

[0627] wherein:
[0628] B1, B2, and B3 each independently represent a nucleotide containing a modification selected from the group consisting of 2′-Oalkyl, 2′-substituted alkoxy, 2′-substituted alkyl, 2′-halo, ENA, and BNA/LNA;
[0629] C1 is a thermally destabilizing nucleotide (e.g., acyclic nucleotide such as UNA or GNA, mismatch, abasic, or DNA) placed at the opposite of the antisense seed region (i.e., positions 2-8 of the 5′-end of the antisense strand);
[0630] T1 represents a nucleotide comprising a chemical modification at the 2′ position or equivalent position in a non-ribose, acyclic or backbone that provide the nucleotide a less steric bulk than a 2′-OMe modification; for example, T1 is selected from the group consisting of DNA, RNA, LNA, 2′-F, and 2′-F-5′-methyl;
[0631] n¹ or n³ is independently 4 to 15 nucleotides in length;
[0632] n⁵ is 1-6 nucleotide(s) in length;
[0633] n⁴ is 1-3 nucleotide(s) in length; and
[0634] n² is 0-3 nucleotide(s) in length.

[0635] In one embodiment, the sense strand sequence having 19, 20, 21, or 22 nucleotides in length of the dsRNA agent is represented by formula (Is):

[chemical structure]

[0636] wherein:
[0637] B1, B2, and B3 each independently represent a nucleotide containing a modification selected from the group consisting of 2′-Oalkyl, 2′-substituted alkoxy, 2′-substituted alkyl, 2′-halo, ENA, and BNA/LNA;
[0638] C1 is a thermally destabilizing nucleotide (e.g., acyclic nucleotide such as UNA or GNA, mismatch, abasic, or DNA) placed at the opposite of the antisense seed region (i.e., positions 2-8 of the 5′-end of the antisense strand);
[0639] T1 represents a nucleotide comprising a chemical modification selected from the group consisting of DNA, RNA, LNA, 2′-F, and 2′-F-5′-methyl;
[0640] n¹ or n³ is independently 4 to 15 nucleotides in length;
[0641] n⁵ is 1-6 nucleotide(s) in length;
[0642] n⁴ is 1-3 nucleotide(s) in length; and
[0643] n² is O-3 nucleotide(s) in length.

[0644] In one embodiment, the dsRNA agent of formula (Is) further comprises 3′ and/or 5′ overhang(s) of 1-10 nucleotides in length. In one example, the dsRNA agent of formula (Is) comprises a 5′ overhang.

[0645] In one embodiment, C1 comprises one thermally destabilizing nucleotide at position 14, 15, 16 or 17 from the 5′-end of the sense strand. For example, C1 is an acyclic nucleotide (e.g., UNA or GNA), mismatch, abasic, or DNA. In one specific example, C1 is a GNA.

[0646] In one embodiment, T1 comprises a DNA, RNA, LNA, 2′-F, or 2′-F-5′-methyl at position 11 from the 5′-end of the sense strand.

[0647] In one embodiment, the dsRNA agent of the invention comprises a sense strand (Is), wherein C1 is an acyclic nucleotide (e.g., UNA or GNA), mismatch, abasic, or DNA; and T1 comprises a DNA, RNA, LNA, 2′-F, or 2′-F-5′-methyl at position 11 from the 5′-end of the sense strand.

[0648] In one embodiment, the antisense strand sequence of the dsRNA agent is represented by formula (Ia):

[chemical structure]

[0649] wherein:
[0650] B1′, B2′, B3′, and B4′ each independently represent a nucleotide containing a modification selected from the group consisting of 2′-Oalkyl, 2′-substituted alkoxy, 2′-substituted alkyl, 2′-halo, ENA, and BNA/LNA;
[0651] T1′, T2′, and T3′ each independently represent a nucleotide comprising a chemical modification at the 2′ position or equivalent position in a non-ribose, acyclic or backbone that provide the nucleotide a less steric bulk than a 2′-OMe modification; for example, T1′, T2′, and T3′ each are independently selected from the group consisting of DNA, RNA, LNA, 2′-F, and 2′-F-5′-methyl;
[0652] q¹ is independently 4 to 15 nucleotides in length;
[0653] q³ or q⁷ is independently 1-6 nucleotide(s) in length;
[0654] q² or q⁶ is independently 1-3 nucleotide(s) in length;
[0655] q⁴ is independently 0-3 nucleotide(s) in length; and
[0656] q⁵ is independently 0-10 nucleotide(s) in length.

[0657] In one embodiment, the antisense strand sequence having 19, 20, 21, 22, 23, 24, or 25 nucleotides in length of the dsRNA agent is represented by formula (Ia):

[chemical structure]

[0658] wherein:
[0659] B1′, B2′, B3′, and B4′ each independently represent a nucleotide containing a modification selected from the group consisting of 2′-Oalkyl, 2′-substituted alkoxy, 2′-substituted alkyl, 2′-halo, ENA, and BNA/LNA;
[0660] T1′, T2′, and T3′ each independently represent a nucleotide comprising a chemical modification selected from the group consisting of DNA, RNA, LNA, 2′-F, and 2′-F-5′-methyl;
[0661] q is independently 4 to 15 nucleotides in length;
[0662] q³ or q⁷ is independently 1-6 nucleotide(s) in length;
[0663] q² or q⁶ is independently 1-3 nucleotide(s) in length;
[0664] q⁴ is independently 0-3 nucleotide(s) in length; and
[0665] q⁵ is independently 0-10 nucleotide(s) in length.

[0666] In one embodiment, dsRNA of formula (Ia) further comprises 3′ and/or 5′ overhang(s) of 1-10 nucleotides in length. In one example, dsRNA of formula (Ia) comprises a 3′ overhang.

[0667] In one embodiment, the invention relates to a double-stranded RNA (dsRNA) agent for inhibiting the expression of a target gene. The dsRNA agent comprises a sense strand and an antisense strand, each strand having 14 to 40 nucleotides:

[chemical structure]

[0668] wherein:
[0669] B1, B2, B3, B1′, B2′, B3′, and B4′ each independently represent a nucleotide containing a modification selected from the group consisting of 2′-Oalkyl, 2′-substituted alkoxy, 2′-substituted alkyl, 2′-halo, ENA, and BNA/LNA;
[0670] C1 is an acyclic nucleotide (e.g., UNA or GNA);
[0671] T1, T1′, T2′, and T3′ each independently represent a nucleotide comprising a chemical modification selected from the group consisting of DNA, RNA, LNA, 2′-F, and 2′-F-5′-methyl;
[0672] n¹, n³, or q¹ is independently 4 to 15 nucleotides in length;
[0673] n⁵, q³ or q⁷ is independently 1-6 nucleotide(s) in length;
[0674] n⁴, q² or q⁶ is independently 1-3 nucleotide(s) in length;
[0675] n² or q⁴ is independently 0-3 nucleotide(s) in length;
[0676] q⁵ is independently 0-10 nucleotide(s) in length; and
[0677] wherein the dsRNA agent has 3′ and/or 5′ overhang(s) of 1-10 nucleotides in length of the antisense and/or sense strand(s).

[0678] In one embodiment, the invention relates to a double-stranded RNA (dsRNA) agent for inhibiting the expression of a target gene. The dsRNA agent comprises a sense strand and an antisense strand, each strand having 14 to 40 nucleotides:

[chemical structure]

[0679] wherein:
[0680] B1, B2, B3, B1′, B2′, B3′, and B4′ each independently represent a nucleotide containing a modification selected from the group consisting of 2′-Oalkyl, 2′-substituted alkoxy, 2′-substituted alkyl, 2′-halo, ENA, and BNA/LNA;
[0681] C1 is an acyclic nucleotide (e.g., UNA or GNA);
[0682] T1, T1′, T2′, and T3′ each independently represent a nucleotide comprising a chemical modification selected from the group consisting of DNA, RNA, LNA, 2′-F, and 2′-F-5′-methyl;
[0683] n¹, n³, or q¹ is independently 4 to 15 nucleotides in length;
[0684] n⁵, q³ or q⁷ is independently 1-6 nucleotide(s) in length;
[0685] n⁴, q² or q⁶ is independently 1-3 nucleotide(s) in length;
[0686] n² or q⁴ is independently 0-3 nucleotide(s) in length;
[0687] q⁵ is independently 0-10 nucleotide(s) in length; and
[0688] wherein the dsRNA agent has a 3′ overhang of 2 nucleotides in length at the 3′-end of the antisense.

[0689] In one embodiment, the invention relates to a double-stranded RNA (dsRNA) agent for inhibiting the expression of a target gene. The dsRNA agent comprises a sense strand and an antisense strand, each strand having 15-30 nucleotides:

[chemical structure]

[0690] wherein:
[0691] B1, B2, B3, B1′, B2′, B3′, and B4′ each independently represent a nucleotide containing a modification 2′-OMe;
[0692] C1 is an acyclic nucleotide GNA;
[0693] T1, T1′, T2′, and T3′ each are independently DNA or RNA;
[0694] n¹, n³, or q¹ is independently 4 to 15 nucleotides in length;
[0695] n⁵, q³ or q⁷ is independently 1-6 nucleotide(s) in length;
[0696] n⁴, q² or q⁶ is independently 1-3 nucleotide(s) in length;
[0697] n² or q⁴ is independently 0-3 nucleotide(s) in length;
[0698] q⁵ is independently 0-10 nucleotide(s) in length; and
[0699] wherein the dsRNA agent has a 3′ overhang of 1-6 nucleotides in length at the 3′-end of the antisense.

[0700] In one embodiment, the invention relates to a double-stranded RNA (dsRNA) agent for inhibiting the expression of a target gene. The dsRNA agent comprises a sense strand and an antisense strand, each strand having 19-23 nucleotides:

[chemical structure]

[0701] wherein:
[0702] B1, B2, B3, B1′, B2′, B3′, and B4′ each independently represent a nucleotide containing a 2′-OMe modification;
[0703] C1 is an acyclic nucleotide GNA;
[0704] T1, T1′, T2′, and T3′ are independently DNA or RNA;
[0705] n¹, n³, q¹, or q³ is independently 4 to 15 nucleotides in length;
[0706] n⁵, q³ or q⁷ is independently 1-6 nucleotide(s) in length;
[0707] n⁴, q² or q⁶ is independently 1-3 nucleotide(s) in length;
[0708] n², q⁴ or q⁵ is independently 0-3 nucleotide(s) in length;
[0709] q⁵ is independently 0-10 nucleotide(s) in length; and
[0710] wherein the dsRNA agent has a 3′ overhang of 2 nucleotides in length at the 3′-end of the antisense.

[0711] In one embodiment, the invention relates to a double-stranded RNA (dsRNA) agent for inhibiting the expression of a target gene. The dsRNA agent comprises a sense strand and an antisense strand, each strand having 14 to 40 nucleotides:

[chemical structure]

[0712] wherein:
[0713] B1, B2, B3, B1′, B2′, B3′, and B4′ each independently represent a nucleotide containing a modification selected from the group consisting of 2′-Oalkyl, 2′-substituted alkoxy, 2′-substituted alkyl, 2′-halo, ENA, and BNA/LNA;
[0714] C1 is an acyclic nucleotide (e.g., UNA or GNA);
[0715] T1, T1′, T2′, and T3′ each independently represent a nucleotide comprising a chemical modification selected from the group consisting of DNA, RNA, LNA, 2′-F, and 2′-F-5′-methyl;
[0716] n¹, n³, or q¹ is independently 4 to 15 nucleotides in length;
[0717] n⁵, q³ or q⁷ is independently 1-6 nucleotide(s) in length;
[0718] n⁴, q² or q⁶ is independently 1-3 nucleotide(s) in length;
[0719] n² or q⁴ is independently 0-3 nucleotide(s) in length;
[0720] q⁵ is independently 0-10 nucleotide(s) in length; and
[0721] wherein the dsRNA agent has a 5′ overhang of 1-10 nucleotides in length at the 5′-end of the sense.

[0722] In one embodiment, the invention relates to a double-stranded RNA (dsRNA) agent for inhibiting the expression of a target gene. The dsRNA agent comprises a sense strand and an antisense strand, each strand having 14 to 40 nucleotides:

[chemical structure]

[0723] wherein:
[0724] B1, B2, B3, B1′, B2′, B3′, and B4′ each independently represent a nucleotide containing a modification selected from the group consisting of 2′-Oalkyl, 2′-substituted alkoxy, 2′-substituted alkyl, 2′-halo, ENA, and BNA/LNA;
[0725] C1 is an acyclic nucleotide (e.g., UNA or GNA);
[0726] T1, T1′, T2′, and T3′ each independently represent a nucleotide comprising a chemical modification selected from the group consisting of DNA, RNA, LNA, 2′-F, and 2′-F-5′-methyl;
[0727] n¹, n³, or q¹ is independently 4 to 15 nucleotides in length;
[0728] n⁵, q³ or q⁷ is independently 1-6 nucleotide(s) in length;
[0729] n⁴, q² or q⁶ is independently 1-3 nucleotide(s) in length;
[0730] n² or q⁴ is independently 0-3 nucleotide(s) in length;
[0731] q⁵ is independently 0-10 nucleotide(s) in length; and
[0732] wherein the dsRNA agent has a5′ overhang of 1-6 nucleotides in length at the 5′-end of the sense.

[0733] In one embodiment, the invention relates to a double-stranded RNA (dsRNA) agent for inhibiting the expression of a target gene. The dsRNA agent comprises a sense strand and an antisense strand, each strand having 14 to 40 nucleotides:

[chemical structure]

[0734] wherein:
[0735] B1, B2, B3, B1′, B2′, B3′, and B4′ each independently represent a nucleotide containing a modification selected from the group consisting of 2′-Oalkyl, 2′-substituted alkoxy, 2′-substituted alkyl, 2′-halo, ENA, and BNA/LNA;
[0736] C1 is an acyclic nucleotide (e.g., UNA or GNA);
[0737] T1, T1′, T2′, and T3′ each independently represent a nucleotide comprising a chemical modification selected from the group consisting of DNA, RNA, LNA, 2′-F, and 2′-F-5′-methyl;
[0738] n¹, n³, or q¹ is independently 4 to 15 nucleotides in length;
[0739] n⁵, q³ or q⁷ is independently 1-6 nucleotide(s) in length;
[0740] n⁴, q² or q⁶ is independently 1-3 nucleotide(s) in length;
[0741] n² or q⁴ is independently 0-3 nucleotide(s) in length;
[0742] q⁵ is independently 0-10 nucleotide(s) in length; and
[0743] wherein the dsRNA agent has a 5′ overhang of 1-10 nucleotides in length at the 5′-end of the sense and a 3′ overhang of 1-10 nucleotides in length at the 5′-end of the antisense strand.

### Thermally Destabilizing Modifications

[0744] The dsRNA agent can be optimized for RNA interference by increasing the propensity of the dsRNA duplex to disassociate or melt (decreasing the free energy of duplex association) by introducing a thermally destabilizing modification in the sense strand at a site opposite to the seed region of the antisense strand (i.e., at positions 2-8 of the 5′-end of the antisense strand). This modification can increase the propensity of the duplex to disassociate or melt in the seed region of the antisense strand.

[0745] The thermally destabilizing modifications can include abasic modification; mismatch with the opposing nucleotide in the opposing strand; and sugar modification such as 2′-deoxy modification or acyclic nucleotide, e.g., unlocked nucleic acids (UNA) or glycerol nucleic acid (GNA).

### Exemplified Abasic Modifications are:

[chemical structure]

### Exemplified Sugar Modifications are:

[chemical structure]

[0746] The term “acyclic nucleotide” refers to any nucleotide having an acyclic ribose sugar, for example, where any of bonds between the ribose carbons (e.g., C1′—C2′, C2′—C3′, C3′—C4′, C4′—O4′, or C1′—O4′) is absent and/or at least one of ribose carbons or oxygen (e.g., C1′, C2′, C3′, C4′ or 04′) are independently or in combination absent from the nucleotide. In some embodiments, acyclic nucleotide is

[chemical structure]

wherein B is a modified or unmodified nucleobase, R¹ and R² independently are H, halogen, OR₃, or alkyl; and R₃ is H, alkyl, cycloalkyl, aryl, aralkyl, heteroaryl or sugar). The term “UNA” refers to unlocked acyclic nucleic acid, wherein any of the bonds of the sugar has been removed, forming an unlocked “sugar” residue. In one example, UNA also encompasses monomers with bonds between C1′—C4′ being removed (i.e. the covalent carbon-oxygen-carbon bond between the C1′ and C4′ carbons). In another example, the C2′—C3′ bond (i.e. the covalent carbon-carbon bond between the C2′ and C3′ carbons) of the sugar is removed (see Mikhailov et. al., Tetrahedron Letters, 26 (17): 2059 (1985); and Fluiter et al., Mol. Biosyst., 10: 1039 (2009), which are hereby incorporated by reference in their entirety). The acyclic derivative provides greater backbone flexibility without affecting the Watson-Crick pairings. The acyclic nucleotide can be linked via 2′-5′ or 3′-5′ linkage.

[0747] The term ‘GNA’ refers to glycol nucleic acid which is a polymer similar to DNA or RNA but differing in the composition of its “backbone” in that is composed of repeating glycerol units linked by phosphodiester bonds:

[chemical structure]

[0748] The thermally destabilizing modification can be mismatches (i.e., noncomplementary base pairs) between the thermally destabilizing nucleotide and the opposing nucleotide in the opposite strand within the dsRNA duplex. Exemplary mismatch basepairs include G:G, G:A, G:U, G:T, A:A, A:C, C:C, C:U, C:T, U:U, T:T, U:T, or a combination thereof. Other mismatch base pairings known in the art are also amenable to the present invention. A mismatch can occur between nucleotides that are either naturally occurring nucleotides or modified nucleotides, i.e., the mismatch base pairing can occur between the nucleobases from respective nucleotides independent of the modifications on the ribose sugars of the nucleotides. In certain embodiments, the dsRNA agent contains at least one nucleobase in the mismatch pairing that is a 2′-deoxy nucleobase; e.g., the 2′-deoxy nucleobase is in the sense strand.

[0749] More examples of abasic nucleotide, acyclic nucleotide modifications (including UNA and GNA), and mismatch modifications have been described in detail in WO 2011/133876, which is herein incorporated by reference in its entirety.

[0750] The thermally destabilizing modifications may also include universal base with reduced or abolished capability to form hydrogen bonds with the opposing bases, and phosphate modifications.

[0751] Nucleobase modifications with impaired or completely abolished capability to form hydrogen bonds with bases in the opposite strand have been evaluated for destabilization of the central region of the dsRNA duplex as described in WO 2010/0011895, which is herein incorporated by reference in its entirety. Exemplary nucleobase modifications are:

[chemical structure]

[0752] Exemplary phosphate modifications known to decrease the thermal stability of dsRNA duplexes compared to natural phosphodiester linkages are:

[chemical structure]

[0753] In one embodiment, the dsRNA agent of the invention can comprise 2′-5′ linkages (with 2′-H, 2′-OH and 2′-OMe and with P═O or P═S). For example, the 2′-5′ linkages modifications can be used to promote nuclease resistance or to inhibit binding of the sense to the antisense strand, or can be used at the 5′ end of the sense strand to avoid sense strand activation by RISC.

[0754] In another embodiment, the dsRNA agent of the invention can comprise L sugars (e.g., L ribose, L-arabinose with 2′-H, 2′-OH and 2′-OMe). For example, these L sugars modifications can be used to promote nuclease resistance or to inhibit binding of the sense to the antisense strand, or can be used at the 5′ end of the sense strand to avoid sense strand activation by RISC.

[0755] In one embodiment, the dsRNA agent is a multimer containing at least two duplexes represented by formula (I), wherein said duplexes are connected by a linker. The linker can be cleavable or non-cleavable. Optionally, said multimer further comprise a ligand. Each of the dsRNA agent can target the same gene or two different genes; or each of the dsRNA agent can target same gene at two different target sites.

[0756] In one embodiment, the dsRNA agent is a multimer containing three, four, five, six or more duplexes represented by formula (I), wherein said duplexes are connected by a linker. The linker can be cleavable or non-cleavable. Optionally, said multimer further comprises a ligand. Each of the dsRNA agent can target the same gene or two different genes; or each of the dsRNA agent can target same gene at two different target sites.

[0757] In one embodiment, two dsRNA agent represented by formula (I) are linked to each other at the 5′ end, and one or both of the 3′ ends of the are optionally conjugated to a ligand. Each of the dsRNA can target the same gene or two different genes; or each of the dsRNA can target same gene at two different target sites.

[0758] Various publications described multimeric siRNA and can all be used with the dsRNA of the invention. Such publications include WO2007/091269, U.S. Pat. No. 7,858,769, WO2010/141511, WO2007/117686, WO2009/014887 and WO2011/031520 which are hereby incorporated by their entirely.

[0759] The dsRNA agent that contains conjugations of one or more carbohydrate moieties to a dsRNA agent can optimize one or more properties of the dsRNA agent. In many cases, the carbohydrate moiety will be attached to a modified subunit of the dsRNA agent. E.g., the ribose sugar of one or more ribonucleotide subunits of a dsRNA agent can be replaced with another moiety, e.g., a non-carbohydrate (preferably cyclic) carrier to which is attached a carbohydrate ligand. A ribonucleotide subunit in which the ribose sugar of the subunit has been so replaced is referred to herein as a ribose replacement modification subunit (RRMS). A cyclic carrier may be a carbocyclic ring system, i.e., all ring atoms are carbon atoms, or a heterocyclic ring system, i.e., one or more ring atoms may be a heteroatom, e.g., nitrogen, oxygen, sulfur. The cyclic carrier may be a monocyclic ring system, or may contain two or more rings, e.g. fused rings. The cyclic carrier may be a fully saturated ring system, or it may contain one or more double bonds.

[0760] The ligand may be attached to the polynucleotide via a carrier. The carriers include (i) at least one “backbone attachment point,” preferably two “backbone attachment points” and (ii) at least one “tethering attachment point.” A “backbone attachment point” as used herein refers to a functional group, e.g. a hydroxyl group, or generally, a bond available for, and that is suitable for incorporation of the carrier into the backbone, e.g., the phosphate, or modified phosphate, e.g., sulfur containing, backbone, of a ribonucleic acid. A “tethering attachment point” (TAP) in some embodiments refers to a constituent ring atom of the cyclic carrier, e.g., a carbon atom or a heteroatom (distinct from an atom which provides a backbone attachment point), that connects a selected moiety. The moiety can be, e.g., a carbohydrate, e.g. monosaccharide, disaccharide, trisaccharide, tetrasaccharide, oligosaccharide and polysaccharide. Optionally, the selected moiety is connected by an intervening tether to the cyclic carrier. Thus, the cyclic carrier will often include a functional group, e.g., an amino group, or generally, provide a bond, that is suitable for incorporation or tethering of another chemical entity, e.g., a ligand to the constituent ring.

[0761] In one embodiment the dsRNA agent of the invention is conjugated to a ligand via a carrier, wherein the carrier can be cyclic group or acyclic group; preferably, the cyclic group is selected from pyrrolidinyl, pyrazolinyl, pyrazolidinyl, imidazolinyl, imidazolidinyl, piperidinyl, piperazinyl, [1,3]dioxolane, oxazolidinyl, isoxazolidinyl, morpholinyl, thiazolidinyl, isothiazolidinyl, quinoxalinyl, pyridazinonyl, tetrahydrofuryl and decalin; preferably, the acyclic group is selected from serinol backbone or diethanolamine backbone.

[0762] The double-stranded RNA (dsRNA) agent of the invention may optionally be conjugated to one or more ligands. The ligand can be attached to the sense strand, antisense strand or both strands, at the 3′-end, 5′-end or both ends. For instance, the ligand may be conjugated to the sense strand, in particular, the 3′-end of the sense strand.

[0763] In one embodiment dsRNA agents of the invention are 5′ phosphorylated or include a phosphoryl analog at the 5′ prime terminus. 5′-phosphate modifications include those which are compatible with RISC mediated gene silencing. Suitable modifications include: 5′-monophosphate ((HO)₂(O)P—O-5′); 5′-diphosphate ((HO)₂(O)P—O—P(HO)(O)—O-5′); 5′-triphosphate ((HO)₂(O)P—O—(HO)(O)P—O—P(HO)(O)—O-5′); 5′-guanosine cap (7-methylated or non-methylated) (7m-G-O-5′-(HO)(O)P—O—(HO)(O)P—O—P(HO)(O)—O-5′); 5′-adenosine cap (Appp), and any modified or unmodified nucleotide cap structure (N—O-5′-(HO)(O)P—O—(HO)(O)P—O—P(HO)(O)—O-5′); 5′-monothiophosphate (phosphorothioate; (HO)2(S)P—O-5′); 5′-monodithiophosphate (phosphorodithioate; (HO)(HS)(S)P—O-5′), 5′-phosphorothiolate ((HO)2(O)P—S-5′); any additional combination of oxygen/sulfur replaced monophosphate, diphosphate and triphosphates (e.g. 5′-alpha-thiotriphosphate, 5′-gamma-thiotriphosphate, etc.), 5′-phosphoramidates ((HO)2(O)P—NH-5′, (HO)(NH₂)(O)P—O-5′), 5′-alkylphosphonates (R=alkyl=methyl, ethyl, isopropyl, propyl, etc., e.g. RP(OH)(O)—O-5′-, 5′-alkenylphosphonates (i.e. vinyl, substituted vinyl), (OH)2(O)P-5′-CH₂—), 5′-alkyletherphosphonates (R=alkylether=methoxymethyl (MeOCH2—), ethoxymethyl, etc., e.g. RP(OH)(O)—O-5′—). In one example, the modification can in placed in the antisense strand of a dsRNA agent.

### REVERSIR Compounds

[0764] In certain instances it is desirable to inhibit siRNA activity. For example, in certain embodiments where the siRNAtarget is an mRNA, it is may be desirable to inhibit siRNA activity and thereby restore expression of a target protein. For example, certain siRNAs have been used therapeutically. In certain such uses, siRNAs are long-acting. In certain instances, such long acting siRNAs are desirable, for their convenience. In such instances, though, it can also be desirable to have a means to reverse the activity of an siRNA. For example, a patient may respond poorly to treatment or receive too high a dose. In such an instance, a reverser compound can be administered to at least partially reduce the RNAi activity of the siRNA. In certain embodiments, the long-lasting effect of siRNA makes waiting for that effect to slowly diminish through natural clearance an unattractive option.

[0765] By way of example, and without limiting the present invention, certain siRNAs are useful for inhibiting blood clotting factors (e.g., Factor II (prothrombin), Factor VII, Factor IX, etc.). Such siRNAs have therapeutic potential as anticoagulants. Long half-lives make such siRNAs particularly attractive, however, if a patient receives too high a dose, has surgery (where anti-coagulation is undesirable) or otherwise desires a decrease in the anti-coagulant effect, a reverser compound to the anti-coagulant siRNA can be administered. Such REVERSIR compound will restore coagulation function more quickly than simply waiting for natural clearance of the siRNA. This example is provided for illustrative purposes. Many siRNAs have been designed to a vast number of targets, including without limitation, a vast number of messenger RNA (mRNA) targets and pre-mRNA targets, as well as a vast number of non-coding RNA targets. REVERSIR compounds provided herein are suitable for any siRNA, regardless of the target or mechanism of the siRNA compound.

[0766] In certain embodiments, the invention provides REVERSIR compounds to an siRNA targeted to an mRNA. In certain such embodiments, the target mRNA encodes a protein involved in metabolism. In certain such embodiments, the target mRNA encodes a protein involved in cardiac function. In certain embodiments, the target mRNA encodes a protein involved in blood-clotting. Exemplary siRNA compounds targeting any of a variety of target proteins are known in the art. Further, methods for preparing siRNA against a target gene are well known in the art and readily available to one of skill in the art.

[0767] Without limitations, target genes for siRNAs include, but are not limited to genes promoting unwanted cell proliferation, growth factor gene, growth factor receptor gene, genes expressing kinases, an adaptor protein gene, a gene encoding a G protein super family molecule, a gene encoding a transcription factor, a gene which mediates angiogenesis, a viral gene, a gene required for viral replication, a cellular gene which mediates viral function, a gene of a bacterial pathogen, a gene of an amoebic pathogen, a gene of a parasitic pathogen, a gene of a fungal pathogen, a gene which mediates an unwanted immune response, a gene which mediates the processing of pain, a gene which mediates a neurological disease, an allene gene found in cells characterized by loss of heterozygosity, or one allege gene of a polymorphic gene.

[0768] Specific exemplary target genes for the siRNAs include, but are not limited to, AT3, AGT, ALAS1, TMPR, HAO1, AGT, C5, CCR-5, PDGF beta gene; Erb-B gene, Src gene; CRK gene; GRB2 gene; RAS gene; MEKK gene; JNK gene; RAF gene; Erk1/2 gene; PCNA(p21) gene; MYB gene; c-MYC gene; JUN gene; FOS gene; BCL-2 gene; Cyclin D gene; VEGF gene; EGFR gene; Cyclin A gene; Cyclin E gene; WNT-1 gene; beta-catenin gene; c-MET gene; PKC gene; NFKB gene; STAT3 gene; survivin gene; Her2/Neu gene; topoisomerase I gene; topoisomerase II alpha gene; p73 gene; p21(WAF1/CIP1) gene, p27(KIP1) gene; PPM1D gene; caveolin I gene; MIB I gene; MTAI gene; M68 gene; tumor suppressor genes; p53 gene; DN-p63 gene; pRb tumor suppressor gene; APC1 tumor suppressor gene; BRCA1 tumor suppressor gene; PTEN tumor suppressor gene; MLL fusion genes, e.g., MLL-AF9, BCR/ABL fusion gene; TEL/AML1 fusion gene; EWS/FLI1 fusion gene; TLS/FUS1 fusion gene; PAX3/FKHR fusion gene; AML1/ETO fusion gene; alpha v-integrin gene; Flt-1 receptor gene; tubulin gene; Human Papilloma Virus gene, a gene required for Human Papilloma Virus replication, Human Immunodeficiency Virus gene, a gene required for Human Immunodeficiency Virus replication, Hepatitis A Virus gene, a gene required for Hepatitis A Virus replication, Hepatitis B Virus gene, a gene required for Hepatitis B Virus replication, Hepatitis C Virus gene, a gene required for Hepatitis C Virus replication, Hepatitis D Virus gene, a gene required for Hepatitis D Virus replication, Hepatitis E Virus gene, a gene required for Hepatitis E Virus replication, Hepatitis F Virus gene, a gene required for Hepatitis F Virus replication, Hepatitis G Virus gene, a gene required for Hepatitis G Virus replication, Hepatitis H Virus gene, a gene required for Hepatitis H Virus replication, Respiratory Syncytial Virus gene, a gene that is required for Respiratory Syncytial Virus replication, Herpes Simplex Virus gene, a gene that is required for Herpes Simplex Virus replication, herpes Cytomegalovirus gene, a gene that is required for herpes Cytomegalovirus replication, herpes Epstein Barr Virus gene, a gene that is required for herpes Epstein Barr Virus replication, Kaposi's Sarcoma-associated Herpes Virus gene, a gene that is required for Kaposi's Sarcoma-associated Herpes Virus replication, JC Virus gene, human gene that is required for JC Virus replication, myxovirus gene, a gene that is required for myxovirus gene replication, rhinovirus gene, a gene that is required for rhinovirus replication, coronavirus gene, a gene that is required for coronavirus replication, West Nile Virus gene, a gene that is required for West Nile Virus replication, St. Louis Encephalitis gene, a gene that is required for St. Louis Encephalitis replication, Tick-borne encephalitis virus gene, a gene that is required for Tick-borne encephalitis virus replication, Murray Valley encephalitis virus gene, a gene that is required for Murray Valley encephalitis virus replication, dengue virus gene, a gene that is required for dengue virus gene replication, Simian Virus 40 gene, a gene that is required for Simian Virus 40 replication, Human T Cell Lymphotropic Virus gene, a gene that is required for Human T Cell Lymphotropic Virus replication, Moloney-Murine Leukemia Virus gene, a gene that is required for Moloney-Murine Leukemia Virus replication, encephalomyocarditis virus gene, a gene that is required for encephalomyocarditis virus replication, measles virus gene, a gene that is required for measles virus replication, Vericella zoster virus gene, a gene that is required for Vericella zoster virus replication, adenovirus gene, a gene that is required for adenovirus replication, yellow fever virus gene, a gene that is required for yellow fever virus replication, poliovirus gene, a gene that is required for poliovirus replication, poxvirus gene, a gene that is required for poxvirus replication, plasmodium gene, a gene that is required for plasmodium gene replication, Mycobacterium ulcerans gene, a gene that is required for Mycobacterium ulcerans replication, Mycobacterium tuberculosis gene, a gene that is required for Mycobacterium tuberculosis replication, Mycobacterium leprae gene, a gene that is required for Mycobacterium leprae replication, Staphylococcus aureus gene, a gene that is required for Staphylococcus aureus replication, Streptococcus pneumoniae gene, a gene that is required for Streptococcus pneumoniae replication, Streptococcus pyogenes gene, a gene that is required for Streptococcus pyogenes replication, Chlamydia pneumoniae gene, a gene that is required for Chlamydia pneumoniae replication, Mycoplasma pneumoniae gene, a gene that is required for Mycoplasma pneumoniae replication, an integrin gene, a selectin gene, complement system gene, chemokine gene, chemokine receptor gene, GCSF gene, Gro1 gene, Gro2 gene, Gro3 gene, PF4 gene, MIG gene, Pro-Platelet Basic Protein gene, MIP-1I gene, MIP-1J gene, RANTES gene, MCP-1 gene, MCP-2 gene, MCP-3 gene, CMBKR1 gene, CMBKR2 gene, CMBKR3 gene, CMBKR5v, AIF-1 gene, I-309 gene, a gene to a component of an ion channel, a gene to a neurotransmitter receptor, a gene to a neurotransmitter ligand, amyloid-family gene, presenilin gene, HD gene, DRPLA gene, SCA1 gene, SCA2 gene, MJD1 gene, CACNL1A4 gene, SCA7 gene, SCA8 gene, allele gene found in loss of heterozygosity (LOH) cells, one allele gene of a polymorphic gene and combinations thereof.

[0769] The loss of heterozygosity (LOH) can result in hemizygosity for sequence, e.g., genes, in the area of LOH. This can result in a significant genetic difference between normal and disease-state cells, e.g., cancer cells, and provides a useful difference between normal and disease-state cells, e.g., cancer cells. This difference can arise because a gene or other sequence is heterozygous in duploid cells but is hemizygous in cells having LOH. The regions of LOH will often include a gene, the loss of which promotes unwanted proliferation, e.g., a tumor suppressor gene, and other sequences including, e.g., other genes, in some cases a gene which is essential for normal function, e.g., growth. Methods of the invention rely, in part, on the specific modulation of one allele of an essential gene with a composition of the invention.

[0770] In certain embodiments, the invention provides REVERSIR compound to an siRNA that modulates a micro-RNA.

[0771] REVERSIR compounds are oligomeric compounds. Accordingly, in certain embodiments, REVERSIR compounds comprise, for example and without limitation, any of the modifications and motifs described in the discussion herein for oligomeric compounds.

[0772] In certain embodiments, motifs are designed with consideration given to both the siRNA and the REVERSIR compound. In certain embodiments, a REVERSIR compound could comprise 4 or more contiguous DNA-like monomers. In certain embodiments, the resulting RNA/DNA duplex could activate RNase H, resulting in cleavage of the RNA-like antisense compound. In certain embodiments, REVERSIR activity does not depend on enzymatic activity. In certain such embodiments, compounds designed without regard for enzymatic compatibility may incorporate modifications to improve other attributes. For example, certain motifs yield oligomeric compounds with high affinity for a target nucleic acid, but that are unable to elicit enzymatic cleavage of that target. Such motifs may be useful for REVERSIR compounds in embodiments where cleavage of the siRNA is not necessary.

[0773] In certain embodiments, one strand of the siRNA, e.g., the strand complementary to REVERSIR compound, and corresponding REVERSIR compound are the same length. In some embodiments, one strand of the siRNA, e.g., the strand complementary to REVERSIR compound, and corresponding REVERSIR compound are different lengths. In some embodiments, the REVERSIR compound is shorter than the corresponding complementary strand from the siRNA. In some embodiments, the REVERSIR compound is shorter by 1, 2, 3, 4, 5, 6, 7, 8, 9, 10 or more nucleotides than the corresponding complementary strand from the siRNA.

[0774] In certain embodiments, antisense strand of the siRNA and corresponding REVERSIR compound are the same length. In some embodiments, antisense strand of the siRNA and corresponding REVERSIR compound are different lengths. In some embodiments, the REVERSIR compound is shorter than the corresponding complementary antisense strand from the siRNA. In some embodiments, the REVERSIR compound is shorter by 1, 2, 3, 4, 5, 6, 7, 8, 9, 10 or more nucleotides than the corresponding complementary antisense strand from the siRNA.

[0775] In certain embodiments, sense strand of the siRNA and corresponding REVERSIR compound are the same length. In some embodiments, sense strand of the siRNA and corresponding REVERSIR compound are different lengths. In some embodiments, the REVERSIR compound is shorter than the corresponding complementary sense strand from the siRNA. In some embodiments, the REVERSIR compound is shorter by 1, 2, 3, 4, 5, 6, 7, 8, 9, 10 or more nucleotides than the corresponding complementary sense strand from the siRNA.

[0776] In certain embodiments, an siRNA and a REVERSIR compound are administered to a patient. In certain such embodiments, pharmaceutical compositions comprising an siRNA and those comprising a REVERSIR compound comprise the same formulation. In certain embodiments, pharmaceutical compositions comprising an siRNA and those comprising a REVERSIR compound comprise different formulations. In certain embodiments an siRNA and a REVERSIR compound are administered by the same route. In certain embodiments an siRNA and a REVERSIR compound are administered by different routes. For example, in certain embodiments, an siRNA is administered orally and a REVERSIR compound is administered by injection. In certain embodiments, the dosages of the siRNA and the REVERSIR compound are the same. In certain embodiments, the dosages of the siRNA and the REVERSIR compound are different.

[0777] In certain embodiments, the toxicity profiles of the siRNA and the REVERSIR compound are similar. In certain embodiments, such toxicity profiles are different. For example, in certain embodiments, an siRNA can be intended for chronic administration and the REVERSIR compound is only intended for acute use as needed. In such embodiments, the tolerance for toxic side-effects of the REVERSIR compound can be higher. Accordingly, modifications and motifs that may be too toxic for use in an siRNA can be acceptable in a REVERSIR compound. For example, in certain embodiments, oligomeric compounds comprising one or more LNA nucleoside have been shown to have high affinity for a target nucleic acid, but in certain embodiments have been shown to cause toxicity at relatively low concentrations. For certain siRNAs, where chronic administration is intended, certain such compounds comprising LNA may not be suitable. However, in embodiments where a REVERSIR compound is not intended for chronic administration, but rather for acute administration when siRNA activity is problematic, such LNA modifications in an antidote compound are acceptable. The increased affinity of LNA can improve the REVERSIR effect and since the REVERSIR compound is only administered for a short period of time, and possibly when the patient is in distress, the increased toxicity of LNA may be justified. Other high affinity, but potentially toxic modifications are also known.

[0778] In certain embodiments, activity of siRNA is counteracted by a non-oligomeric REVERSIR. For example, in certain embodiments, when the target nucleic acid is a target mRNA encoding a protein it is desirable to reduce the activity of siRNA and to increase in the amount of the target protein (e.g., target protein amount has gone too low, or circumstances have changed resulting in the desire to restore target protein amount). In such embodiments, one can simply administer the target protein itself. Such administration will immediately reverse the siRNA activity of target protein reduction. However, it can also be desirable to administer an oligomeric REVERSIR compound according to the present invention. For example, the target protein may have a short half-life in the animal. Accordingly, to maintain the restored target protein concentration would require repeated administration of target protein until the siRNA has cleared and normal protein expression is restored. In certain such embodiments, it is still desirable to administer an REVERSIR compound to shorten the duration of the siRNA activity. In certain embodiments an oligomeric REVERSIR compound is co-administered with a non-oligomeric REVERSIR. In certain such embodiments, the non-oligomeric REVERSIR is a target protein. In certain embodiments, the non-oligomeric REVERSIR compound is a protein having similar physiological effect as a target protein or that stimulates expression of the target protein.

### Research Tools

[0779] In certain instances, siRNAs have been used as research tools. For example, researchers investigating the function of a particular gene product can design siRNAs to reduce the amount of that gene product present in a cell or an animal and observe phenotypic changes in the cell or animal. In certain embodiments, the present invention provides methods for reducing the amount of a gene product in a cell or animal through RNAi and then reducing that RNAi activity, thereby restoring the inhibited gene product. In certain embodiments, investigators can use such techniques to characterize proteins or untranslated nucleic acids. In certain embodiments, investigators can vary the amount of time between siRNA and REVERSIR compounds administration. In certain embodiments, such experiments are used to investigate kinetics and/or turnover of gene products and/or certain cellular functions.

[0780] As described herein, the invention provides methods comprising administering to a subject a siRNA followed by administering a REVERSIR compound or composition comprising same. Without limitation, the siRNA and the REVERSIR compound can be conjugated or unconjugated. Further, the siRNA and the REVERSIR compound can be independently encapsulated in a lipid formulation, e.g., a LNP, or other nucleic acid-lipid particle. Moreover, the siRNA and the REVERSIR compound can be administered, independently, via any appropriate route or mode of administration. For example, the siRNA and the REVERSIR compound can be independently administered via intravenous administration (IV) or via subcutaneous administration (SC).

[0781] Accordingly, in some embodiments, the invention provides methods comprising administering to a subject an unconjugated siRNA followed by administering a conjugated REVERSIR compound, wherein the REVERSIR compound is encapsulated in a lipid formulation, e.g., a LNP, or other nucleic acid-lipid particle, and wherein the REVERSIR compound is administered via intravenous administration.

[0782] In some other embodiments, the invention provides methods comprising administering to a subject an unconjugated siRNA followed by administering a conjugated REVERSIR compound, wherein the REVERSIR compound is encapsulated in a lipid formulation and the REVERSIR compound is administered via subcutaneous administration.

[0783] In yet some other embodiments, the invention provides methods comprising administering to a subject a conjugated siRNA followed by administering a conjugated REVERSIR compound, wherein the REVERSIR compound is encapsulated in a lipid formulation and the REVERSIR compound is administered via intravenous administration.

[0784] In still some other embodiments, the invention provides methods comprising administering to a subject a conjugated siRNA followed by administering a conjugated REVERSIR compound, wherein the REVERSIR compound is encapsulated in a lipid formulation and the REVERSIR compound is administered via subcutaneous administration.

[0785] While the above described embodiments specify conjugated REVERSIR compounds, unconjugated REVERSIR compounds can also be used. Thus, in some embodiments, the invention provides methods comprising administering to a subject an unconjugated siRNA followed by administering an unconjugated REVERSIR compound, wherein the REVERSIR compound is encapsulated in a lipid formulation and the REVERSIR compound is administered via intravenous administration. In some other embodiments, the invention provides methods comprising administering to a subject an unconjugated siRNA followed by administering an unconjugated REVERSIR compound, wherein the REVERSIR compound is encapsulated in a lipid formulation and the REVERSIR compound is administered via subcutaneous administration. In yet some other embodiments, the invention provides methods comprising administering to a subject a conjugated siRNA followed by administering an unconjugated REVERSIR compound, wherein the REVERSIR compound is encapsulated in a lipid formulation and the REVERSIR compound is administered via intravenous administration.

[0786] In still some other embodiments, the invention provides methods comprising administering to a subject a conjugated siRNA followed by administering an unconjugated REVERSIR compound, wherein the REVERSIR compound is encapsulated in a lipid formulation and the REVERSIR compound is administered via subcutaneous administration.

### Kits

[0787] In certain embodiments, the present invention provides kits comprising one or more siRNAs and one or more corresponding REVERSIR compound. In certain embodiments, such kits are intended for therapeutic application. In certain embodiments, such kits are intended for research use.

[0788] While certain compounds, compositions and methods described herein have been described with specificity in accordance with certain embodiments, the following examples serve only to illustrate the compounds described herein and are not intended to limit the same. Each of the references, GenBank accession numbers, and the like recited in the present application is incorporated herein by reference in its entirety.

[0789] The nucleoside sequences set forth in the sequence listing and Examples, are independent of any modification to a sugar moiety, a monomeric linkage, or a nucleobase. As such, oligomeric compounds defined by a SEQ ID NO can comprise, independently, one or more modifications to a sugar moiety, an internucleoside linkage, or a nucleobase.

### EXAMPLES

### Example 1: Reversal of Antithrombin (AT) Knockdown in Wild-Type Mice

[0790] Sixty wild-type mice (C57BL/6, female) were bled on Day −1 to obtain pre-dose blood samples. All animals were subsequently injected subcutaneously with a single dose of ALN-57213 at 3 mg/kg on Day 0. On Day 3, 3 mice per group received a single subcutaneous injection of one of 19 different reversal agents (Table 2) at a dose of 10 mg/kg. Three animals did not receive an injection on Day 3 and served as an untreated control. All animals were bled on Days 7, 11, and 15 to obtain serum samples. Serum samples were then analyzed for AT antigen level by AT ELISA and were normalized to the pre-dose AT level for each animal. FIG. 1 displays normalized group mean (±S.D.) AT levels. As indicated in FIG. 1, multiple reversal agents reduced the level of AT knockdown mediated by a single subcutaneous dose of ALN-57213.

TABLE 2
Design and Synthesis of 19 exemplary REVERSIR compounds (primarily varying length and LNAs)

| | | | SEQ | | | |
|---|---|---|---|---|---|---|
| Design | | | ID | length | | |
| feature | REVERSIR sequence | Alnylam # | NO | (nt) | #LNAs | Description |
| Basic | cugguuaacaccauuuacuucadAL96 | A-132289 | 1 | 22 | 0 | Full length 1-22; all |
| design | | | | | | OMe; No PS |
| | | | | | | linkages |
| | csusgguuaacaccauuuacuuscsadAL96 | A-132290 | 2 | 22 | 0 | Full length 1-22; all |
| | | | | | | OMe; two PS |
| | | | | | | linkages each at |
| | | | | | | both ends |
| Length | csusgsgsususasascsascscsasususu | A-132291 | 3 | 22 | 0 | Full length 1-22; all |
| reduction | sascsususcsadAL96 | | | | | OMe |
| | gsususasascsascscsasusususascsu | A-132292 | 4 | 18 | 0 | Fragment 4-22; all |
| | suscsadAL96 | | | | | OMe |
| | ascsascscsasusususascsususcsadAL96 | A-132293 | 5 | 15 | 0 | Fragment 8-22; all |
| | | | | | | OMe |
| LNAs in | cs(Tlns)gsgsususasascsascscsasu | A-132294 | 6 | 22 | 2 | Full length 1-22; all |
| full | sususascsususcs(Alns)adAL96 | | | | | OMe except LNA |
| length; | | | | | | @ n2, 22 |
| 22-mer | cs(Tlns)gs(Glns)ususasascsascscsa | A-132295 | 7 | 22 | 4 | Full length 1-22; all |
| | susususascsus(Tlns)cs(Alns)adAL96 | | | | | OMe except LNA |
| | | | | | | @ n2, 4, 20, 22 |
| | cs(Tlns)gs(Glns)ususasascsascscsa | A-132296 | 8 | 22 | 5 | Full length 1-22; all |
| | susususas(m5clns)us(Tlns)cs(Alns) | | | | | OMe except LNA |
| | adAL96 | | | | | @ n2, 4, 18, 20, 22 |
| | cs(Tlns)gs(Glns)ususasascs(Alns) | A-132297 | 9 | 22 | 6 | Full length 1-22; all |
| | cscsasusususas(m5clns)us(Tlns)cs | | | | | OMe except LNA @ n2, |
| | (Aln)dAL96 | | | | | 4, 10, 18, 20, 22 |
| LNAs in | (Glns)ususasascsascscsasusususas | A-132298 | 10 | 18 | 2 | Fragment 4-22; all |
| 4-22 | csususcs(Aln)dAL96 | | | | | OMe except LNA |
| fragment; | | | | | | @ n4, 22 |
| 18-mer | (Glns)ususasascsascscsasusususas | A-132299 | 11 | 18 | 3 | Fragment 4-22; all |
| | csus(Tlns)cs(Aln)dAL96 | | | | | OMe except LNA |
| | | | | | | @ n4, 20, 22 |
| | (Glns)ususasascsascscsasusususas | A-132300 | 12 | 18 | 4 | Fragment 4-22; all |
| | (m5clns)us(Tlns)cs(Aln)dAL96 | | | | | OMe except LNA |
| | | | | | | @ n4, 18, 20, 22 |
| | (Glns)ususasascs(Alns)cscsasusu | A-132301 | 13 | 18 | 5 | Fragment 4-22; all |
| | susas(m5clns)us(Tlns)cs(Aln)dAL96 | | | | | OMe except LNA |
| | | | | | | @ n4, 10, 18, 20, 22 |
| LNAs in | (Alns)csascscsasusususascsususcs | A-132302 | 14 | 15 | 2 | Fragment 8-22; all |
| 8-22 | (Aln)dAL96 | | | | | OMe except LNA |
| fragment; | | | | | | @ n8, 22 |
| 15-mer | (Alns)(m5clns)ascscsasusususascsus | A-132303 | 15 | 15 | 4 | Fragment 8-22; all |
| | (Tlns)cs(Aln)dAL96 | | | | | OMe except LNA |
| | | | | | | @ n8, 9, 20, 22 |
| | (Alns)cs(Alns)cscsasusususas | A-132304 | 16 | 15 | 5 | Fragment 8-22; all |
| | (m5Clns)us(Tlns)cs(Aln)dAL96 | | | | | OMe except LNA |
| | | | | | | @ 8, 10, 18, 20, 22 |
| DNA nts | cs(Tlns)dGs(Glns)ususasascs(Alns)dCscsa | A-132305 | 17 | 22 | 6 | Full length; LNA |
| in LNA | susususas(m5clns)dTs(Tlns)dCs(Aln)dAL96 | | | | | @ n2, 4, 10, 18, 20, |
| region; | | | | | | 22; DNA @ 3, 11, |
| varying | | | | | | 19, 21 |
| length | (Glns)ususasascs(Alns)dCscsasusususas | A-132306 | 18 | 22 | 5 | Fragment 4-22; all |
| | (m5clns) dTs(Tlns)dCs(Aln)dAL96 | | | | | OMe except LNA |
| | | | | | | @ n4, 10, 18, 20, |
| | | | | | | 22; DNA @ 11, 19, |
| | | | | | | 21 |
| | (Alns)cs(Alns)dCscsasusususas(m5clns)dTs | A-132307 | 19 | 22 | 5 | Fragment 8-22; all |
| | (Tlns)dCs(Aln)dAL96 | | | | | OMe except LNA |
| | | | | | | @ 8, 10, 18, 20, |
| | | | | | | 22; DNA @ 11, 19, |
| | | | | | | 21 |

If, not indicated, all OMe with full PS linkages

TABLE 3
Inclusion of DNA residues may reduce activity

| | | | Serum AT | | | | |
|---|---|---|---|---|---|---|---|
| | | | levels | | | Alnyl- | SEQ |
| REVERSIR | length | # | Day | Day | Day | am | ID |
| sequence | (nt) | LNAs | 7 | 11 | 15 | # | NO |
| cs(Tlns) | 22 | 6 | 0.92 | 1.06 | 1.03 | A- | 9 |
| gs(Glns) | | | | | | 132297 | |
| ususasas | | | | | | | |
| cs(Alns) | | | | | | | |
| cscsasus | | | | | | | |
| ususas | | | | | | | |
| (m5clns) | | | | | | | |
| us(Tlns) | | | | | | | |
| cs(Aln) | | | | | | | |
| dAL96 | | | | | | | |
| cs(Tlns) | 22 | 6 | 0.86 | 1.00 | 0.97 | A- | 17 |
| dGs(Glns) | | | | | | 132305 | |
| ususasasc | | | | | | | |
| s(Alns)dC | | | | | | | |
| scsasusus | | | | | | | |
| usas | | | | | | | |
| (m5clns) | | | | | | | |
| dTs(Tlns) | | | | | | | |
| dCs(Aln) | | | | | | | |
| dAL96 | | | | | | | |
| (Glns)us | 18 | 5 | 0.85 | 0.98 | 1.01 | A- | 13 |
| usasascs | | | | | | 132301 | |
| (Alns)cs | | | | | | | |
| csasusus | | | | | | | |
| usas | | | | | | | |
| (m5clns) | | | | | | | |
| us(Tlns) | | | | | | | |
| cs(Aln) | | | | | | | |
| dAL96 | | | | | | | |
| (Glns)us | 18 | 5 | 0.61 | 0.66 | 0.68 | A- | 18 |
| usasascs | | | | | | 132306 | |
| (Alns)dC | | | | | | | |
| scsasusu | | | | | | | |
| susas | | | | | | | |
| (m5clns) | | | | | | | |
| dTs(Tlns) | | | | | | | |
| dCs(Aln) | | | | | | | |
| dAL96 | | | | | | | |
| (Alns)cs | 15 | 5 | 1.00 | 0.80 | 0.91 | A- | 16 |
| (Alns)cs | | | | | | 132304 | |
| csasusus | | | | | | | |
| usas | | | | | | | |
| (m5Clns) | | | | | | | |
| us(Tlns) | | | | | | | |
| cs(Aln) | | | | | | | |
| dAL96 | | | | | | | |
| (Alns)cs | 15 | 5 | 0.88 | 0.77 | 0.72 | A- | 19 |
| (Alns)dC | | | | | | 132307 | |
| scsasusu | | | | | | | |
| susas | | | | | | | |
| (m5clns) | | | | | | | |
| dTs(Tlns) | | | | | | | |
| dCs(Aln) | | | | | | | |
| dAL96 | | | | | | | |

TABLE 4
In vitro Transfection of REVERSIR compounds targeting AD-57213

| | In vitro dual-luc- 2pt dose response | | | | siRNA then REVERSIR | REVERSIR then siRNA |
|---|---|---|---|---|---|---|
| REVERSIR | 1 nM | | 10 nM | | transfection | transfection |
| ID | avg | SD | avg | SD | IC₅₀ (nM) | IC₅₀ (nM) |
| A-132289 | 21.1 | 1.4 | 40.5 | 5.6 | 0.786 | 0.650 |
| A-132290 | 41.5 | 5.5 | 77.0 | 7.2 | 0.569 | 0.955 |
| A-132291 | 24.4 | 1.6 | 46.5 | 6.1 | 0.965 | 0.749 |
| A-132292 | 24.6 | 1.8 | 47.2 | 7.9 | 0.498 | 0.341 |
| A-132293 | 16.3 | 0.9 | 17.5 | 2.0 | 0.119 | N/A |
| A-132294 | 30.6 | 6.0 | 61.3 | 3.2 | 0.322 | 0.440 |
| A-132295 | 45.3 | 5.2 | 82.3 | 6.0 | 0.408 | 0.132 |
| A-132296 | 50.4 | 6.0 | 79.3 | 5.3 | 0.381 | 0.053 |
| A-132297 | 54.8 | 16.6 | 83.4 | 4.6 | 0.355 | 0.061 |
| A-132298 | 24.1 | 3.3 | 56.0 | 4.0 | | |
| A-132299 | 26.7 | 4.4 | 56.6 | 4.0 | | |
| A-132300 | 40.3 | 5.9 | 70.1 | 1.6 | | |
| A-132301 | 69.7 | 6.9 | 88.4 | 8.7 | 0.383 | 0.075 |
| A-132302 | 18.0 | 2.7 | 31.7 | 2.7 | | |
| A-132303 | 17.8 | 1.0 | 45.4 | 8.8 | | |
| A-132304 | 25.1 | 3.3 | 57.1 | 7.3 | 1.060 | 0.382 |
| A-132305 | 48.6 | 3.8 | 75.8 | 10.0 | | |
| A-132306 | 53.4 | 4.0 | 72.2 | 7.4 | | |
| A-132307 | 18.2 | 1.6 | 46.1 | 9.4 | | |

TABLE 5
4-dose free-uptake in vitro of REVERSIR compounds targeting AD-57213

| | SEQ | | 100 | | 10 | | 1 | | 0.1 | |
|---|---|---|---|---|---|---|---|---|---|---|
| | ID | | nM | | nM | | nM | | nM | |
| REVERSIR | NO | 5′-Sequence-3′ | avg | SD | avg | SD | avg | SD | avg | SD |
| A-132301 | 13 | (Glns)ususasascs(Alns)cscsasusususas | 76.9 | 5.9 | 61.5 | 5.8 | 19.6 | 16.7 | 3.8 | 1.3 |
| | | (m5Clns)us(Tlns)cs(Aln)dAL96 | | | | | | | | |
| A-135676 | 20 | (Glns)ususasascs(Alns)csgsususususas | 2.9 | 0.7 | 7.4 | 4.2 | 2.8 | 2.0 | 3.8 | 1.1 |
| | | (Glns)as(Tlns)cs(Aln)dAL96 | | | | | | | | |
| A-135677 | 21 | (Alns)cscsususas(Tlns)asusascsgsasus | 3.5 | 2.1 | 6.4 | 1.9 | 2.5 | 1.2 | 4.7 | 1.0 |
| | | (Tlns)as(m5Clns)us(m5Cln)dAL96 | | | | | | | | |
| A-135678 | 22 | gs(Tces)usasascsas(m5Cces)csasusususas | 80.4 | 16.9 | 104.6 | 23.4 | 35.0 | 27.5 | 13.4 | 3.4 |
| | | (m5Cces)us(Tces)(m5Cces)adAL96 | | | | | | | | |
| A-135679 | 23 | gs(Tlns)usasascsas(m5Clns)csasusususas | 104.9 | 19.1 | 97.4 | 32.9 | 37.9 | 16.5 | 20.5 | 5.5 |
| | | (m5Clns)us(Tlns)(m5Clns)adAL96 | | | | | | | | |
| A-135680 | 24 | gs(Tces)usasascsas(m5Cces)csausususas | 85.9 | 16.1 | 128.3 | 18.2 | 27.8 | 23.2 | 10.5 | 4.6 |
| | | (m5Cces)us(Tces)(m5Cces)adAL96 | | | | | | | | |
| A-135681 | 25 | gs(Tces)usasascsas(m5Cces)csdAusususas | 88.0 | 29.1 | 137.6 | 30.3 | 36.3 | 21.1 | 13.8 | 6.0 |
| | | (m5Cces)us(Tces)(m5Cces)adAL96 | | | | | | | | |
| A-135682 | 26 | gsususasascsascscsas(Tces)us(Tces)as | 82.8 | 17.0 | 129.2 | 47.8 | 31.6 | 23.0 | 11.6 | 4.7 |
| | | (m5Cces)us(Tces)(m5Cces)adAL96 | | | | | | | | |
| A-135683 | 27 | gsususasascsascscsas(Tlns)us(Tlns)as | 97.5 | 22.4 | 100.5 | 25.6 | 41.2 | 19.2 | 14.6 | 4.4 |
| | | (m5Clns)us(Tlns)(m5Clns)adAL96 | | | | | | | | |
| A-135684 | 28 | gs(Tces)(Tces)asas(m5Cces)as(m5Cces) | 72.4 | 23.5 | 95.8 | 40.8 | 7.6 | 0.9 | 6.4 | 0.9 |
| | | (m5Cces)asusususascsususcsadAL96 | | | | | | | | |
| A-135685 | 29 | gs(Tlns)(Tlns)asas(m5Clns)as(m5Clns) | 67.7 | 3.4 | 84.2 | 7.8 | 14.2 | 5.8 | 5.0 | 3.0 |
| | | (m5Clns)asusususascsususcsadAL96 | | | | | | | | |
| A-135686 | 30 | gsususasascsas(m5Cces)(m5Cces)as(Tces) | 64.8 | 13.6 | 115.7 | 34.8 | 30.3 | 25.8 | 4.3 | 1.8 |
| | | (Tces)(Tces)ascsususcsadAL96 | | | | | | | | |
| A-135687 | 31 | gsususasascsas(m5Clns)(m5Clns)as(Tlns) | 69.1 | 12.9 | 42.4 | 15.9 | 14.0 | 4.5 | 2.9 | 1.1 |
| | | (Tlns)(Tlns)ascsususcsadAL96 | | | | | | | | |
| A-135688 | 32 | gs(Tces)usasas(m5Cces)ascscsas(Tces) | 87.6 | 16.5 | 44.4 | 13.7 | 22.5 | 2.9 | 7.1 | 3.7 |
| | | ususas(m5Cces)usus(m5Cces)adAL96 | | | | | | | | |
| A-135689 | 33 | gs(Tlns)usasas(m5Clns)ascscsas(Tlns) | 95.8 | 20.5 | 102.5 | 20.0 | 53.3 | 22.3 | 16.7 | 7.9 |
| | | ususas(m5Clns)usus(m5Clns)adAL96 | | | | | | | | |
| A-135690 | 34 | gsususasas(m5Cces)as(m5Cces)(m5Cces) | 96.7 | 16.9 | 66.7 | 25.9 | 29.1 | 3.8 | 13.2 | 1.0 |
| | | asusususas(m5Cces)usus(m5Cces)adAL96 | | | | | | | | |
| A-135691 | 35 | gsususasas(m5Clns)as(m5Clns)(m5Clns) | 125.8 | 27.0 | 93.7 | 52.2 | 36.7 | 21.4 | 15.8 | 11.2 |
| | | asusususas(m5Clns)usus(m5Clns)adAL96 | | | | | | | | |
| A-135692 | 36 | gsususasas(m5Cces)ascs(m5Cces)asusus | 110.9 | 16.0 | 106.8 | 20.1 | 15.6 | 6.0 | 11.0 | 4.0 |
| | | usas(m5Cces)usus(m5Cces)adAL96 | | | | | | | | |
| A-135693 | 37 | gsususasas(m5Clns)ascs(m5Clns)asusus | 118.1 | 15.3 | 93.2 | 40.3 | 62.6 | 33.9 | 19.4 | 7.2 |
| | | usas(m5Clns)usus(m5Clns)adAL96 | | | | | | | | |
| A-135694 | 38 | gsususasas(m5Cces)ascs(m5Cces)as(Tces) | 85.4 | 9.1 | 69.7 | 15.1 | 22.1 | 13.4 | 11.1 | 3.0 |
| | | ususascsusus(m5Cces)adAL96 | | | | | | | | |
| A-135695 | 39 | gsususasascsascs(m5Cces)as(Tces)ususas | 66.3 | 11.3 | 56.3 | 19.4 | 14.9 | 9.3 | 8.0 | 2.1 |
| | | csus(Tces)(m5Cces)adAL96 | | | | | | | | |
| A-135696 | 40 | gsususasascsascscsas(Tces)us(Tces)ascs | 80.5 | 15.7 | 96.0 | 23.2 | 18.6 | 3.3 | 8.5 | 2.7 |
| | | (Tces)us(m5Cces)adAL96 | | | | | | | | |
| A-135697 | 41 | gsususasascsascscsas(Tces)ususascs | 32.6 | 6.8 | 47.5 | 10.0 | 8.4 | 4.4 | 3.4 | 1.5 |
| | | (Tces)(Tces)(m5Cces)adAL96 | | | | | | | | |
| A-135698 | 42 | gs(Tces)usasas(m5Cces)ascs(m5Cces)as | 83.2 | 36.7 | 37.4 | 10.0 | 14.5 | 5.7 | 4.3 | 2.4 |
| | | (Tces)ususascsususcsadAL96 | | | | | | | | |
| A-135699 | 43 | gs(Tces)(Tces)asas(m5Cces)ascscsas | 56.3 | 10.4 | 40.3 | 21.7 | 9.1 | 4.7 | 2.6 | 1.1 |
| | | (Tces)ususascsususcsadAL96 | | | | | | | | |
| A-135700 | 44 | gsususasascsascscsas(Tces)ususascs | 56.3 | 15.9 | 46.5 | 24.4 | 9.4 | 5.8 | 5.8 | 1.0 |
| | | (Tces)us(m5Cces)adAL96 | | | | | | | | |
| A-135701 | 45 | gs(Tces)usasas(m5Cces)ascscsas(Tces) | 90.1 | 8.3 | 68.3 | 12.3 | 14.3 | 11.9 | 12.5 | 4.9 |
| | | ususascsususcsadAL96 | | | | | | | | |
| A-135702 | 46 | gs(Tces)(Tces)asascsascscsas(Tces) | 68.9 | 11.9 | 43.7 | 24.4 | 9.5 | 3.9 | 13.1 | 3.3 |
| | | ususascsususcsadAL96 | | | | | | | | |
| A-135703 | 47 | gs(Tces)(Tces)asas(m5Cces) | 57.7 | 7.7 | 38.9 | 16.9 | 11.1 | 5.3 | 14.8 | 1.0 |
| | | ascscsasusususascsususcsadAL96 | | | | | | | | |
| A-135704 | 48 | gs(Tces)usaaca(m5Cce)casusuusa | 108.7 | 17.2 | 80.6 | 20.4 | 52.4 | 31.7 | 23.2 | 5.6 |
| | | (m5Cce)us(Tce)(m5Cces)adAL96 | | | | | | | | |
| A-135705 | 49 | gs(Tce)usaaca(m5Cce)casuuua(m5Cce) | 94.4 | 19.0 | 89.6 | 7.5 | 49.1 | 21.6 | 21.8 | 3.5 |
| | | us(Tce)(m5Cce)adAL96 | | | | | | | | |
| A-135706 | 50 | gs(Tces)uaaca(m5Cce)cauuua(m5Cce) | 69.5 | 7.7 | 52.9 | 13.6 | 20.2 | 6.2 | 11.9 | 3.8 |
| | | u(Tces)(m5Cces)adAL96 | | | | | | | | |
| A-135707 | 51 | gs(Tce)uaaca(m5Cce)cauuua(m5Cce) | 71.1 | 19.5 | 58.7 | 10.0 | 28.3 | 23.8 | 14.2 | 4.6 |
| | | u(Tce)(m5Cces)adAL96 | | | | | | | | |
| A-135708 | 52 | gs(Tces)uaacaccauuuacuuscsadAL96 | 44.5 | 7.6 | 47.2 | 27.9 | 11.4 | 4.4 | 8.6 | 4.9 |
| A-135709 | 53 | gsus(Tce)aacaccauuuacuuscsadAL96 | 33.2 | 6.1 | 43.8 | 17.3 | 7.4 | 3.6 | 6.1 | 1.6 |
| A-135710 | 54 | gsusuaa(m5Cce)accauuuacuuscsadAL96 | 34.8 | 15.8 | 67.0 | 9.7 | 16.4 | 8.3 | 5.7 | 1.8 |
| A-135711 | 55 | gsusuaaca(m5Cce)cauuuacuuscsadAL96 | 66.8 | 15.6 | 29.9 | 18.5 | 4.2 | 1.1 | 3.6 | 1.5 |
| A-135712 | 56 | gsusuaacac(m5Cce)auuuacuuscsadAL96 | 43.0 | 11.0 | 35.6 | 11.4 | 9.6 | 5.1 | 6.6 | 2.8 |
| A-135713 | 57 | gsusuaacacca(Tce)uuacuuscsadAL96 | 48.8 | 7.2 | 39.1 | 6.3 | 14.7 | 6.2 | 8.4 | 2.8 |
| A-135714 | 58 | gsusuaacaccau(Tce)uacuuscsadAL96 | 44.1 | 17.1 | 32.0 | 13.4 | 20.7 | 12.1 | 9.5 | 2.2 |
| A-135715 | 59 | gsusuaacaccauu(Tce)acuuscsadAL96 | 51.7 | 13.8 | 42.6 | 20.5 | 19.7 | 13.9 | 8.7 | 4.5 |
| A-135716 | 60 | gsusuaacaccauuua(m5Cce)uuscsadAL96 | 84.0 | 8.2 | 73.9 | 36.3 | 27.0 | 21.5 | 14.9 | 7.8 |
| A-135717 | 61 | gsusuaacaccauuuac(Tce)uscsadAL96 | 61.5 | 20.7 | 41.9 | 5.5 | 13.9 | 8.1 | 7.7 | 2.8 |
| A-135718 | 62 | gsusuaacaccauuuacu(Tces)csadAL96 | 51.8 | 13.2 | 33.1 | 13.9 | 7.4 | 1.5 | 7.4 | 2.6 |
| A-135719 | 63 | gsusuaacaccauuuacuus(m5Cces)adAL96 | 61.0 | 12.9 | 38.1 | 4.4 | 13.6 | 7.8 | 9.9 | 4.8 |
| A-135720 | 64 | gs(Tlns)uaacaccauuuacuuscsadAL96 | 61.3 | 10.7 | 43.5 | 14.8 | 16.2 | 12.4 | 5.6 | 2.4 |
| A-135721 | 65 | gsus(Tln)aacaccauuuacuuscsadAL96 | 35.4 | 7.5 | 40.8 | 17.9 | 9.1 | 4.2 | 5.2 | 2.0 |
| A-135722 | 66 | gsusuaa(m5Cln)accauuuacuuscsadAL96 | 24.6 | 13.4 | 38.8 | 11.2 | 7.9 | 1.7 | 3.6 | 1.6 |
| A-135723 | 67 | gsusuaaca(m5Cln)cauuuacuuscsadAL96 | 47.8 | 15.5 | 17.6 | 4.3 | 4.4 | 1.0 | 2.0 | 1.0 |
| A-135724 | 68 | gsusuaacac(m5Cln)auuuacuuscsadAL96 | 56.4 | 4.0 | 18.6 | 7.0 | 8.6 | 5.9 | 4.6 | 3.1 |
| A-135725 | 69 | gsusuaacacca(Tln)uuacuuscsadAL96 | 55.1 | 13.9 | 22.8 | 7.1 | 14.2 | 3.5 | 8.3 | 3.4 |
| A-135726 | 70 | gsusuaacaccau(Tln)uacuuscsadAL96 | 39.8 | 4.3 | 23.1 | 9.4 | 6.3 | 2.9 | 10.2 | 4.4 |
| A-135727 | 71 | gsusuaacaccauu(Tln)acuuscsadAL96 | 54.4 | 15.0 | 25.3 | 5.6 | 12.0 | 4.8 | 8.8 | 3.3 |
| A-135728 | 72 | gsusuaacaccauuua(m5Cln)uuscsadAL96 | 89.1 | 32.8 | 45.7 | 18.9 | 27.5 | 4.5 | 18.1 | 4.8 |
| A-135729 | 73 | gsusuaacaccauuuac(Tln)uscsadAL96 | 57.7 | 21.0 | 32.3 | 18.0 | 11.4 | 5.6 | 9.0 | 2.3 |
| A-135730 | 74 | gsusuaacaccauuuacu(Tlns)csadAL96 | 54.9 | 10.3 | 25.2 | 8.9 | 20.6 | 16.3 | 11.1 | 3.8 |
| A-135731 | 75 | gsusuaacaccauuuacuus(m5Clns)adAL96 | 58.2 | 8.4 | 28.8 | 8.1 | 10.1 | 7.0 | 9.8 | 1.7 |
| A-135732 | 76 | gsususasasY5sascscsasusususascsusus | 72.6 | 4.5 | 39.3 | 17.7 | 7.5 | 1.9 | 6.6 | 2.7 |
| | | Y5sadAL96 | | | | | | | | |
| A-135733 | 77 | gsususasasY5sascscsasusususasY5susu | 54.3 | 10.2 | 30.2 | 20.7 | 3.4 | 2.2 | 5.6 | 4.0 |
| | | scsadAL96 | | | | | | | | |
| A-135734 | 78 | gsususasascsasY5scsasusususascsusus | 55.4 | 31.8 | 43.9 | 25.4 | 10.8 | 4.8 | 3.0 | 0.4 |
| | | Y5sadAL96 | | | | | | | | |
| A-135735 | 79 | gsususasascsascsY5sasusususasY5susu | 65.1 | 10.4 | 27.0 | 14.7 | 5.1 | 1.7 | 2.5 | 1.4 |
| | | scsadAL96 | | | | | | | | |
| A-135736 | 80 | gsususasasY5sasY5scsasusususascsusu | 64.8 | 31.1 | 17.1 | 12.4 | 4.5 | 2.7 | 3.7 | 1.1 |
| | | scsadAL96 | | | | | | | | |
| A-135737 | 81 | gsususasasY5sascsY5sasusususascsusu | 64.3 | 20.4 | 26.9 | 15.7 | 4.7 | 2.3 | 4.6 | 2.0 |
| | | scsadAL96 | | | | | | | | |
| A-135738 | 82 | gsususasascsascscsasusususasY5susus | 60.5 | 20.5 | 25.2 | 12.3 | 8.9 | 3.8 | 7.2 | 4.0 |
| | | Y5sadAL96 | | | | | | | | |
| A-135739 | 83 | gsususasasY5sascscsasusususascsusus | 76.9 | 12.2 | 30.3 | 15.6 | 11.5 | 5.7 | 7.4 | 2.4 |
| | | csadAL96 | | | | | | | | |
| A-135740 | 84 | gsususasascsasY5scsasusususascsusus | 99.1 | 38.2 | 43.2 | 20.0 | 9.4 | 6.0 | 8.4 | 4.4 |
| | | csadAL96 | | | | | | | | |
| A-135741 | 85 | gsususasascsascsY5sasusususascsusus | 86.5 | 12.9 | 55.1 | 33.0 | 7.2 | 1.3 | 5.1 | 3.0 |
| | | csadAL96 | | | | | | | | |
| A-135742 | 86 | gsususasascsascscsasusususasY5susus | 81.2 | 10.4 | 33.4 | 17.8 | 13.4 | 3.8 | 9.6 | 2.4 |
| | | csadAL96 | | | | | | | | |
| A-135743 | 87 | gsususasascsascscsasusususascsususY | 69.0 | 13.7 | 36.6 | 20.8 | 15.3 | 16.7 | 7.5 | 3.5 |
| | | 5sadAL96 | | | | | | | | |
| A-135744 | 88 | gsususasasY24sascsY24sasusususascsu | 30.1 | 6.3 | 19.7 | 6.2 | 7.8 | 3.1 | 5.0 | 1.8 |
| | | susY24sadAL96 | | | | | | | | |
| A-135745 | 89 | gsususasasY24sascscsasusususasY24su | 9.6 | 2.8 | 8.7 | 5.6 | 5.8 | 3.1 | 3.0 | 0.8 |
| | | susY24sadAL96 | | | | | | | | |
| A-135746 | 90 | gsususasasY24sascscsasusususascsusu | 6.7 | 2.9 | 11.9 | 7.8 | 2.8 | 1.2 | 2.5 | 1.2 |
| | | sY24sadAL96 | | | | | | | | |
| A-135747 | 91 | gsususasasY24sascscsasusususasY24su | 22.8 | 11.8 | 5.1 | 1.7 | 2.0 | 0.7 | 2.0 | 0.6 |
| | | suscsadAL96 | | | | | | | | |
| A-135748 | 92 | gsususasascsascsY24sasusususasY24su | 28.3 | 1.9 | 7.0 | 3.2 | 2.9 | 2.3 | 4.2 | 1.5 |
| | | suscsadAL96 | | | | | | | | |
| A-135749 | 93 | gsususasasY24sasY24scsasusususascsu | 24.1 | 6.6 | 13.6 | 4.4 | 4.9 | 2.3 | 3.5 | 2.0 |
| | | suscsadAL96 | | | | | | | | |
| A-135750 | 94 | gsususasascsascscsasusususasY24susu | 16.7 | 5.1 | 12.7 | 10.0 | 9.9 | 10.1 | 6.7 | 4.3 |
| | | sY24sadAL96 | | | | | | | | |
| A-135751 | 95 | gsususasasY27sascscsasusususasY27 | 60.8 | 23.5 | 16.6 | 7.7 | 8.6 | 5.9 | 4.8 | 2.6 |
| | | sususY27sadAL96 | | | | | | | | |
| A-135752 | 96 | gsusuaacaccauuuacuuscsadAL96 | 58.1 | 29.6 | 32.3 | 17.0 | 14.7 | 12.5 | 7.6 | 3.4 |
| A-135753 | 97 | gsUfsusAfsasCfsasCfscsAfsusUf | 48.0 | 10.1 | 23.0 | 12.4 | 8.0 | 4.4 | 3.6 | 2.8 |
| | | susAfscsUfsusCfsadAL96 | | | | | | | | |
| A-135754 | 98 | GfsusUfsasAfscsAfscscsasUfsus | 84.3 | 18.9 | 29.3 | 14.2 | 12.7 | 9.2 | 5.8 | 2.6 |
| | | UfsasCfsusUfscsAfdAL96 | | | | | | | | |
| A-135755 | 99 | gsUfsusAfsasCfsasCfscsasusUfsus | 32.9 | 6.8 | 15.4 | 4.0 | 7.5 | 5.4 | 5.3 | 1.9 |
| | | AfscsUfsusCfsadAL96 | | | | | | | | |
| A-135756 | 100 | gsUfsuAfsaCfsaCfscasuUfsuAfscUfsus | 42.4 | 13.7 | 29.1 | 13.4 | 4.9 | 3.7 | 6.3 | 3.7 |
| | | CfsadAL96 | | | | | | | | |
| A-135757 | 101 | gs(Tces)usAfsas(m5Cces)asCfscsasus | 44.3 | 12.7 | 20.6 | 5.1 | 4.2 | 3.7 | 2.9 | 1.7 |
| | | UfsusAfscsUfsusCfsadAL96 | | | | | | | | |
| A-135758 | 102 | gsUfsusAfsasCfsasCfscsasusUfsusAfscs | 27.4 | 9.7 | 20.4 | 11.6 | 12.1 | 8.0 | 2.8 | 3.5 |
| | | (Tces)us(m5Cces)adAL96 | | | | | | | | |
| A-135759 | 103 | gsUfsusAfsasCfsasCfs(m5Cces)as | 68.3 | 15.7 | 26.9 | 11.7 | 4.1 | 1.1 | 2.4 | 0.3 |
| | | (Tces)UfsusAfscsUfsusCfsadAL96 | | | | | | | | |
| A-135760 | 104 | gs(Tces)usAfsas(m5Cces)asCfscsasus | 61.4 | 14.2 | 22.3 | 1.4 | 2.5 | 1.0 | 2.1 | 0.4 |
| | | (Tces)usAfscsUfsusCfsadAL96 | | | | | | | | |
| A-135761 | 105 | gsgs(Tces)usasascsas(m5Cces)csasusus | 71.2 | 18.9 | 82.9 | 11.2 | 12.8 | 6.7 | 6.0 | 3.3 |
| | | usas(m5Cces)us(Tces)(m5Cce)dAL96 | | | | | | | | |
| A-135762 | 106 | (Tces)gsgs(Tces)usasascsas(m5Cces) | 19.3 | 7.6 | 17.3 | 4.1 | 5.9 | 5.4 | 3.8 | 1.9 |
| | | csasusususas(m5Cces)us(Tce)dCL96 | | | | | | | | |
| A-135763 | 107 | cs(Tces)gsgs(Tces)usasascsas(m5Cces) | 6.1 | 3.5 | 7.9 | 4.5 | 3.7 | 3.1 | 5.3 | 3.0 |
| | | csasusus(Tces)as(m5Cces)udTL96 | | | | | | | | |
| A-135764 | 108 | gs(Tces)UfsAfsAfsCfsAfs(m5Cces)CfsAfsUfs | 82.6 | 8.4 | 47.2 | 32.8 | 6.5 | 3.3 | 5.6 | 2.7 |
| | | UfsUfsAfs(m5Cces)Ufs(Tces)(m5Cces)adAL96 | | | | | | | | |
| A-135765 | 109 | gsUfsUfsAfsAfsCfsAfsCfsCfsAfsUfsUfsUfsA | 88.7 | 12.8 | 30.2 | 7.5 | 7.0 | 2.5 | 3.7 | 2.1 |
| | | fsCfsUfsUfsCfsadAL96 | | | | | | | | |
| A-135766 | 110 | gsUfsUfAfAfCfAfCfCfAfUfUfUfAfCfUfUfs | 6.1 | 3.4 | 5.5 | 3.1 | 2.5 | 1.6 | 4.0 | 1.0 |
| | | CfsadAL96 | | | | | | | | |

TABLE 6
IC₅₀ free-uptake in vitro of REVERSIR
compounds targeting AD-57213

| | SEQ | | |
|---|---|---|---|
| REVERSIR | ID | | IC₅₀ |
| ID | NO | 5′-Sequence-3′ | (nM) |
| A-138952 | 111 | csusgsgsususasas | >100 |
| | | csascscsas(Tlns) | |
| | | us(Tlns)as | |
| | | (m5Clns)us(Tlns) | |
| | | (m5Clns)adAL96 | |
| A-135683 | 112 | gsususasascsascs | 9.6 |
| | | csas(Tlns)us | |
| | | (Tlns)as(m5Clns) | |
| | | us(Tlns)(m5Clns) | |
| | | adAL96 | |
| A-138953 | 113 | ascsascscsas | 2.5 |
| | | (Tlns)us(Tlns)as | |
| | | (m5Clns)us(Tlns) | |
| | | (m5Clns)adAL96 | |
| A-138954 | 114 | csascscsas(Tlns) | 0.49 |
| | | us(Tlns)as | |
| | | (m5Clns)us(Tlns) | |
| | | (m5Clns)adAL96 | |
| A-138955 | 115 | ascscsas(Tlns)us | 0.71 |
| | | (Tlns)as(m5Clns) | |
| | | us(Tlns)(m5Clns) | |
| | | adAL96 | |
| A-138956 | 116 | cscsas(Tlns)us | 0.29 |
| | | (Tlns)as(m5Clns) | |
| | | us(Tlns)(m5Clns) | |
| A-138957 | 117 | csas(TladAL96ns) | 0.27 |
| | | us(Tlns)as | |
| | | (m5Clns)us(Tlns) | |
| | | (m5Clns)adAL96 | |
| A-138958 | 118 | as(Tlns)us(Tlns) | 0.22 |
| | | as(m5Clns)us | |
| | | (Tlns)(m5Clns) | |
| | | adAL96 | |
| A-138959 | 119 | (Tlns)us(Tlns)as | <0.015 |
| | | (m5Clns)us(Tlns) | |
| | | (m5Clns)adAL96 | |

TABLE 7
REVERSIR compounds targeting AD-57213 used in the in vivo experiments

| | SEQ ID | |
|---|---|---|
| siRNA | NO | 5′-Sequence-3′ |
| AD-57213 | 120 | GfsgsUfuAfaCfaCfCfAfuUfuAfcUfuCfaAfL96 |
| | 121 | usUfsgAfaGfuAfaAfuggUfgUfuAfaCfcsasg |
| REVERSIR | | |
| ID | | 5′-Sequence-3′ |
| A-132293 | 5 | ascsascscsasusususascsususcsadAL96 |
| A-132302 | 14 | (Alns)csascscsasusususascsususcs(Aln)dAL96 |
| A-132303 | 15 | (Alns)(m5Clns)ascscsasusususascsus(Tlns)cs(Aln)dAL96 |
| A-132304 | 16 | (Alns)cs(Alns)cscsasusususas(m5Clns)us(Tlns)cs(Aln)dAL96 |
| A-132296 | 8 | cs(Tlns)gs(Glns)ususasascsascscsasusususas(m5Clns)us(Tlns)cs(Alns)adAL96 |
| A-132301 | 13 | (Glns)ususasascs(Alns)cscsasusususas(m5Clns)us(Tlns)cs(Aln)dAL96 |
| A-135678 | 22 | gs(Tces)usasascsas(m5Cces)csasusususas(m5Cces)us(Tces)(m5Cces)adAL96 |
| A-135679 | 23 | gs(Tlns)usasascsas(m5Clns)csasusususas(m5Clns)us(Tlns)(m5Clns)adAL96 |
| A-135704 | 48 | gs(Tces)usaaca(m5Cce)casusuusa(m5Cce)us(Tce)(m5Cces)adAL96 |
| A-138953 | 113 | ascsascscsas(Tlns)us(Tlns)as(m5Clns)us(Tlns)(m5Clns)adAL96 |
| A-140335 | 122 | (Tlns)as(m5Clns)us(Tlns)(m5Clns)adAL96 |
| A-138955 | 115 | ascscsas(Tlns)us(Tlns)as(m5Clns)us(Tlns)(m5Clns)adAL96 |
| A-140336 | 123 | (Tlns)as(m5Clns)(Tlns)(Tlns)(m5Clns)adAL96 |
| A-138957 | 117 | csas(Tlns)us(Tlns)as(m5Clns)us(Tlns)(m5Clns)adAL96 |
| A-138959 | 119 | (Tlns)us(Tlns)as(m5Clns)us(Tlns)(m5Clns)adAL96 |
| A-140339 | 124 | csas(Tln)us(Tln)as(m5Cln)us(Tln)(m5Clns)adAL96 |
| A-140340 | 125 | (Tlns)us(Tln)as(m5Cln)us(Tln)(m5Clns)adAL96 |
| A-140337 | 126 | ascsascscsas(Tln)us(Tln)as(m5Cln)us(Tln)(m5Clns)adAL96 |
| A-140338 | 127 | ascscsas(Tln)us(Tln)as(m5Cln)us(Tln)(m5Clns)adAL96 |

TABLE 8
4-dose free-uptake in vitro of REVERSIR compounds targeting AD-66568

| | SEQ | | 100 | | 10 | | 1 | | 0.1 | |
|---|---|---|---|---|---|---|---|---|---|---|
| | ID | | nM | | nM | | nM | | nM | |
| REVERSIR | NO | 5′-Sequence-3′ | avg | SD | avg | SD | avg | SD | avg | SD |
| A-138962.1 | 128 | ususcsasgsusascscsususasgsasgsususcscsas | 47.6 | 12.3 | 50.2 | 6.3 | 23.1 | 4.8 | 15.7 | 3.6 |
| | | csusdAL96 | | | | | | | | |
| A-138963.1 | 129 | ususcsasgsusascscsususasgsasgsususcscsas | 48.9 | 13.8 | 57.6 | 7.7 | 33.4 | 3.2 | 22.8 | 5.4 |
| | | cs(Tln)dAL96 | | | | | | | | |
| A-138964.1 | 130 | ususcsasgsusascscsususasgsasgsususcscsas | 67.4 | 17.0 | 67.1 | 10.2 | 23.6 | 6.8 | 19.8 | 4.8 |
| | | (m5Clns)(Tln)dAL96 | | | | | | | | |
| A-138965.1 | 131 | ususcsasgsusascscsususasgsasgsususcs(m5Clns) | 69.7 | 11.1 | 65.1 | 11.9 | 33.8 | 11.3 | 21.3 | 3.3 |
| | | as(m5Clns)(Tln)dAL96 | | | | | | | | |
| A-138966.1 | 132 | ususcsasgsusascscsususasgsasgsus(Tlns)cs | 63.8 | 13.5 | 63.9 | 6.4 | 22.2 | 3.6 | 15.9 | 3.8 |
| | | (m5Clns)as(m5Clns)(Tln)dAL96 | | | | | | | | |
| A-138967.1 | 133 | ususcsasgsusascscsususasgsasgs(Tlns)(Tlns) | 53.1 | 3.2 | 60.9 | 6.4 | 21.4 | 3.7 | 16.1 | 1.6 |
| | | cs(m5Clns)as(m5Clns)(Tln)dAL96 | | | | | | | | |
| A-138968.1 | 134 | ususcsasgsusascscsus(Tlns)asgsasgs(Tlns) | 57.9 | 8.6 | 59.4 | 14.8 | 20.8 | 4.1 | 17.3 | 0.7 |
| | | (Tlns)cs(m5Clns)as(m5Clns)(Tln)dAL96 | | | | | | | | |
| A-138969.1 | 135 | ususcsasgsusas(m5Clns)csus(Tlns)asgsasgs | 71.0 | 12.6 | 63.4 | 8.6 | 24.0 | 1.8 | 16.0 | 3.5 |
| | | (Tlns)(Tlns)cs(m5Clns)as(m5Clns)(Tln)dAL96 | | | | | | | | |
| A-138970.1 | 136 | uscsasgsusascscsususasgsasgs(Tlns)(Tlns) | 55.5 | 7.0 | 43.3 | 5.8 | 20.3 | 3.2 | 18.1 | 2.7 |
| | | cs(m5Clns)as(m5Clns)(Tln)dAL96 | | | | | | | | |
| A-138971.1 | 137 | csasgsusascscsususasgsasgs(Tlns)(Tlns) | 44.3 | 20.0 | 65.0 | 13.8 | 20.3 | 3.3 | 21.5 | 3.7 |
| | | cs(m5Clns)as(m5Clns)(Tln)dAL96 | | | | | | | | |
| A-138972.1 | 138 | asgsusascscsususasgsasgs(Tlns)(Tlns)cs(m5Clns) | 56.8 | 17.3 | 59.3 | 10.2 | 26.2 | 9.5 | 20.2 | 4.4 |
| | | as(m5Clns)(Tln)dAL96 | | | | | | | | |
| A-138973.1 | 139 | gsusascscsususasgsasgs(Tlns)(Tlns)cs(m5Clns) | 42.3 | 16.0 | 53.7 | 7.7 | 29.1 | 7.0 | 18.6 | 4.2 |
| | | as(m5Clns)(Tln)dAL96 | | | | | | | | |
| A-138974.1 | 140 | usascscsususasgsasgs(Tlns)(Tlns)cs(m5Clns) | 59.7 | 18.3 | 55.8 | 6.9 | 27.9 | 3.8 | 20.6 | 5.8 |
| | | as(m5Clns)(Tln)dAL96 | | | | | | | | |
| A-138975.1 | 141 | ascscsususasgsasgs(Tlns)(Tlns)cs(m5Clns)as | 50.0 | 5.0 | 51.2 | 5.4 | 38. 6 | 12.3 | 22.4 | 2.0 |
| | | (m5Clns)(Tln)dAL96 | | | | | | | | |
| A-138976.1 | 142 | cscsususasgsasgs(Tlns)(Tlns)cs(m5Clns)as(m5Clns) | 82.6 | 17.8 | 65.4 | 13.9 | 31.9 | 3.5 | 20.4 | 3.7 |
| | | (Tln)dAL96 | | | | | | | | |
| A-138977.1 | 143 | csususasgsasgs(Tlns)(Tlns)cs(m5Clns)as(m5Clns) | 74.4 | 7.8 | 60.4 | 9.4 | 27.8 | 6.9 | 17.8 | 4.1 |
| | | (Tln)dAL96 | | | | | | | | |
| A-138978.1 | 144 | ususasgsasgs(Tlns)(Tlns)cs(m5Clns)as(m5Clns) | 77.0 | 6.5 | 62.5 | 10.7 | 22.6 | 2.4 | 19.8 | 5.0 |
| | | (Tln)dAL96 | | | | | | | | |
| A-138979.1 | 145 | usasgsasgs(Tlns)(Tlns)cs(m5Clns)as(m5Clns) | 73.7 | 15.1 | 57.6 | 8.8 | 31.4 | 8.2 | 17.6 | 2.4 |
| | | (Tln)dAL96 | | | | | | | | |
| A-138980.1 | 146 | asgsasgs(Tlns)(Tlns)cs(m5Clns)as(m5Clns)(Tln) | 72.2 | 12.7 | 61.0 | 4.9 | 32.5 | 7.4 | 16.8 | 2.7 |
| | | dAL96 | | | | | | | | |
| A-138981.1 | 147 | gsasgs(Tlns)(Tlns)cs(m5Clns)as(m5Clns)(Tln)dAL96 | 81.6 | 9.0 | 66.4 | 7.7 | 33.3 | 6.2 | 20.2 | 1.5 |
| A-138982.1 | 148 | asgs(Tlns)(Tlns)cs(m5Clns)as(m5Clns)(Tln)dAL96 | 104.3 | 8.9 | 61.1 | 12.0 | 41.2 | 8.2 | 24.5 | 2.6 |
| A-138983.1 | 149 | gs(Tlns)(Tlns)cs(m5Clns)as(m5Clns)(Tln)dAL96 | 84.6 | 22.8 | 83.1 | 12.6 | 52.0 | 14.6 | 24.4 | 2.6 |
| A-138984.1 | 150 | (Tlns)(Tlns)cs(m5Clns)as(m5Clns)(Tln)dAL96 | 54.2 | 14.0 | 55.9 | 3.5 | 22.7 | 4.0 | 19.4 | 3.1 |
| A-138985.1 | 151 | csususasgsasgs(Tlns)(Tlns)cs(m5Clns)as(m5Clns) | 52.1 | 14.5 | 53.9 | 4.1 | 19.2 | 7.9 | 18.4 | 1.3 |
| | | (Tlns)adAL96 | | | | | | | | |
| A-138976.2 | 152 | cscsususasgsasgs(Tlns)(Tlns)cs(m5Clns)as(m5Clns) | 68.6 | 26.2 | 48.6 | 4.1 | 29.0 | 6.2 | 24.1 | 3.4 |
| | | (Tln)dAL96 | | | | | | | | |
| A-138986.1 | 153 | ascscsus(Tlns)asgsasgs(Tlns)(Tlns)cs(m5Clns)as | 84.0 | 20.6 | 54.6 | 22.8 | 37. 5 | 11.8 | 28.0 | 9.9 |
| | | (m5Cln)dAL96 | | | | | | | | |
| A-138987.1 | 154 | usascs(m5Clns)us(Tlns)asgsasgs(Tlns)(Tlns)cs | 75.5 | 4.8 | 57.4 | 10.6 | 29.5 | 4.2 | 19.6 | 2.5 |
| | | (m5Clns)adAL96 | | | | | | | | |
| A-138988.1 | 155 | gsusascs(m5Clns)us(Tlns)asgsasgs(Tlns)(Tlns) | 63.1 | 6.9 | 58.2 | 15.3 | 24.0 | 5.1 | 21.6 | 5.6 |
| | | cs(m5Cln)dAL96 | | | | | | | | |
| A-138989.1 | 156 | asgs(Tlns)ascs(m5Clns)us(Tlns)asgsasgs(Tlns) | 43.8 | 3.5 | 38.1 | 6.3 | 18.3 | 1.5 | 18.2 | 4.3 |
| | | (Tlns)cdAL96 | | | | | | | | |
| A-138990.1 | 157 | csasgs(Tlns)ascs(m5Clns)us(Tlns)asgsasgs(Tlns) | 29.7 | 12.3 | 26.2 | 1.8 | 18.1 | 3.4 | 15.5 | 3.1 |
| | | (Tln)dAL96 | | | | | | | | |
| A-138991.1 | 158 | us(m5Clns)asgs(Tlns)ascs(m5Clns)us(Tlns)asgsasgs | 34.0 | 7.2 | 31.1 | 7.8 | 18.2 | 3.4 | 18.2 | 1.7 |
| | | (Tln)dAL96 | | | | | | | | |
| A-138992.1 | 159 | (Tlns)us(m5Clns)asgs(Tlns)ascs(m5Clns)us(Tlns)as | 37.9 | 7.7 | 31.1 | 6.1 | 20.0 | 2.3 | 18.4 | 0.7 |
| | | gsasgdAL96 | | | | | | | | |
| A-138976.3 | 160 | cscsususasgsasgs(Tlns)(Tlns)cs(m5Clns)as(m5Clns) | 69.2 | 12.9 | 65.4 | 8.8 | 23.0 | 3.8 | 21.2 | 3.9 |
| | | (Tln)dAL96 | | | | | | | | |
| A-138993.1 | 161 | cscsususasgsasgs(Tlns)(Tlns)cs(m5Clns)as(m5Clns) | 59.3 | 14.8 | 65.1 | 6.8 | 25.0 | 5.0 | 20.8 | 3.4 |
| | | (Tlns)dAL96 | | | | | | | | |
| A-138994.1 | 162 | cscsususasgsasgs(Tlns)(Tlns)cs(m5Clns)as(m5Clns) | 46.2 | 10.7 | 59.1 | 14.9 | 21.9 | 2.8 | 22.1 | 2.4 |
| | | (Tlns)aL96 | | | | | | | | |
| A-138995.1 | 163 | cscsususasgsasgs(Tlns)(Tlns)cs(m5Clns)as(m5Clns) | 52.7 | 5.8 | 53.4 | 6.9 | 20.9 | 4.9 | 20.1 | 2.6 |
| | | (Tlns)asL96 | | | | | | | | |
| A-138996.1 | 164 | cscsususasgsasgs(Tlns)(Tlns)cs(m5Clns)as(m5Clns) | 65.6 | 8.3 | 50.6 | 1.9 | 34.9 | 13.2 | 28.0 | 5.5 |
| | | (Tln)dTL96 | | | | | | | | |
| A-138997.1 | 165 | cscsususasgsasgs(Tlns)(Tlns)cs(m5Clns)as(m5Clns) | 79.9 | 6.4 | 56.8 | 6.5 | 41.2 | 12.8 | 29.3 | 10.0 |
| | | (Tln)dGL96 | | | | | | | | |
| A-138998.1 | 166 | cscsususasgsasgs(Tlns)(Tlns)cs(m5Clns)as(m5Clns) | 50.7 | 5.9 | 42.9 | 8.0 | 32.5 | 3.2 | 23.6 | 1.8 |
| | | (Tln)dCL96 | | | | | | | | |
| A-138976.4 | 167 | cscsususasgsasgs(Tlns)(Tlns)cs(m5Clns)as(m5Clns) | 83.3 | 24.1 | 69.5 | 6.1 | 28.0 | 3.5 | 26.1 | 6.0 |
| | | (Tln)dAL96 | | | | | | | | |
| A-138999.1 | 168 | (m5Clns)(m5Clns)us(Tlns)asgsasgs(Tlns)(Tlns)cscs | 113.8 | 15.2 | 78.2 | 12.6 | 31.6 | 8.1 | 18.7 | 4.1 |
| | | ascsudAL96 | | | | | | | | |
| A-139000.1 | 169 | cscs(Tlns)(Tlns)asgsasgs(Tlns)(Tlns)cs(m5Clns) | 98.7 | 14.8 | 73.6 | 2.5 | 20.9 | 7.2 | 19.4 | 1.5 |
| | | ascsudAL96 | | | | | | | | |
| A-139001.1 | 170 | (m5Clns)csus(Tlns)asgsasgs(Tlns)uscs(m5Clns) | 82.2 | 25.7 | 77.3 | 5.9 | 32.0 | 5.1 | 21.3 | 8.9 |
| | | ascs(Tln)dAL96 | | | | | | | | |
| A-139002.1 | 171 | cscsususasgsasgs(Tlns)(Tlns)cs(m5Clns)as(m5Clns) | 29.6 | 11.0 | 44.1 | 14.7 | 16.3 | 1.7 | 17.6 | 4.8 |
| | | (Tln) | | | | | | | | |
| A-139003.1 | 172 | cscsuuagag(Tln)(Tln)c(m5Cln)a(m5Clns)(Tln) | 20.8 | 4.5 | 29.7 | 5.6 | 11.8 | 3.9 | 17.3 | 2.7 |
| A-139004.1 | 173 | cscsususasgsasgs(Tln)(Tln)cs(m5Cln)as(m5Clns) | 29.1 | 8.8 | 51.6 | 7.2 | 18.2 | 4.8 | 20.8 | 4.2 |
| | | (Tln) | | | | | | | | |
| A-139005.1 | 174 | cscsususasgsasgs(Tlns)(Tlns)cs(m5Clns)as(m5Clns) | 27.1 | 3.9 | 36.0 | 13.1 | 14.5 | 4.0 | 20.9 | 3.3 |
| | | (Tln)dAL10 | | | | | | | | |
| A-139006.1 | 175 | cscsuuagag(Tln)(Tln)c(m5Cln)a(m5Clns)(Tln)dAL10 | 44.0 | 14.0 | 40.9 | 4.4 | 18.7 | 3.9 | 22.0 | 4.7 |
| A-139007.1 | 176 | cscsususasgsasgs(Tln)(Tln)cs(m5Cln)as(m5Clns) | 28.1 | 12.2 | 29.1 | 3.6 | 24.2 | 6.6 | 32.8 | 3.2 |
| | | (Tln)dAL10 | | | | | | | | |
| A-139008.1 | 177 | Q173Q173cscsususasgsasgs(Tlns)(Tlns)cs(m5Clns) | 81.3 | 7.7 | 65.0 | 5.5 | 30.4 | 7.5 | 21.3 | 3.4 |
| | | as(m5Clns)(Tln) | | | | | | | | |
| A-139009.1 | 178 | cscsuuagag(Tln)(Tln)c(m5Cln)a(m5Clns)(Tln)dAL96 | 96.7 | 12.8 | 65.9 | 8.6 | 55.9 | 8.6 | 26.8 | 6.1 |
| A-139010.1 | 179 | cscsususasgsasgs(Tln)(Tln)cs(m5Cln)as(m5Clns) | 105.5 | 15.8 | 73.1 | 9.4 | 41.5 | 14.9 | 28.2 | 8.6 |
| | | (Tln)dAL96 | | | | | | | | |
| A-139011.1 | 180 | cscsususasgsasgs(Tln)(Tln)cs(m5Cln)as(m5Cln) | 103.1 | 20.5 | 76.2 | 13.9 | 30.7 | 6.3 | 22.4 | 5.4 |
| | | (Tln)dAL96 | | | | | | | | |
| A-139012.1 | 181 | cscsususasgsasgsususY5scsascsudAL96 | 67.3 | 9.4 | 46.7 | 5.6 | 21.4 | 4.3 | 19.4 | 1.7 |
| A-139013.1 | 182 | cscsususasgsasgsususcsY5sascsusdAL96 | 67.6 | 12.9 | 46.5 | 5.3 | 26.8 | 5.7 | 18.0 | 3.0 |
| A-139014.1 | 183 | cscsususasgsasgsususcscsasY5sudAL96 | 37.0 | 13.2 | 34.9 | 12.8 | 23.6 | 6.2 | 18.6 | 2.2 |
| A-139015.1 | 184 | csY5sususasgsasgsususcscsascsudAL96 | 68.4 | 13.9 | 61.3 | 9.9 | 20.8 | 5.0 | 19.9 | 2.8 |
| A-139016.1 | 185 | (m5Clns)csususasgsasgsususcscsascsudAL96 | 44.2 | 8.7 | 51.2 | 8.7 | 18.6 | 3.2 | 20.7 | 1.7 |
| A-139017.1 | 186 | cs(m5Clns)ususasgsasgsususcscsascsudAL96 | 64.5 | 4.1 | 55.7 | 7.6 | 24.0 | 3.6 | 23.3 | 4.5 |
| A-139018.1 | 187 | cscs(Tlns)usasgsasgsususcscsascsudAL96 | 54.1 | 15.2 | 41.4 | 3.8 | 20.9 | 8.1 | 24.6 | 2.5 |
| A-139019.1 | 188 | cscsus(Tlns)asgsasgsususcscsascsudAL96 | 59.2 | 13.0 | 52.1 | 4.5 | 26.4 | 6.6 | 29.3 | 6.7 |
| A-139020.1 | 189 | cscsusus(Alns)gsasgsususcscsascsudAL96 | 54.4 | 25.0 | 45.6 | 7.4 | 23.1 | 7.9 | 19.8 | 2.1 |
| A-139021.1 | 190 | cscsususas(Glns)asgsususcscsascsudAL96 | 69.0 | 6.4 | 60.3 | 8.4 | 33.2 | 8.9 | 19.3 | 3.6 |
| A-139022.1 | 191 | cscsususasgs(Alns)gsususcscsascsudAL96 | 57.2 | 6.5 | 42.7 | 13.2 | 36.7 | 12.0 | 22.5 | 5.7 |
| A-139023.1 | 192 | cscsususasgsas(Glns)ususcscsascsudAL96 | 58.9 | 4.9 | 43.2 | 10.4 | 22.6 | 4.5 | 21.9 | 6.1 |
| A-139024.1 | 193 | cscsususasgsasgs(Tlns)uscscsascsudAL96 | 70.6 | 12.4 | 48.2 | 3.3 | 24.1 | 2.9 | 19.1 | 3.6 |
| A-139025.1 | 194 | cscsususasgsasgsus(Tlns)cscsascsudAL96 | 64.7 | 24.2 | 49.5 | 8.1 | 25.5 | 6.7 | 16.2 | 2.5 |
| A-139026.1 | 195 | cscsususasgsasgsusus(m5Clns)csascsudAL96 | 99.4 | 10.2 | 71.4 | 10.6 | 35.6 | 5.2 | 20.0 | 3.1 |
| A-139027.1 | 196 | cscsususasgsasgsususcs(m5Clns)ascsudAL96 | 59.2 | 8.7 | 51.8 | 8.5 | 22.6 | 6.8 | 16.6 | 3.1 |
| A-139028.1 | 197 | cscsususasgsasgsususcscs(Alns)csudAL96 | 45.6 | 8.7 | 46.8 | 15.6 | 22.9 | 4.6 | 20.2 | 2.3 |
| A-139029.1 | 198 | cscsususasgsasgsususcscsas(m5Clns)usdAL96 | 42.6 | 4.2 | 39.5 | 12.5 | 20.0 | 4.7 | 20.5 | 4.5 |
| A-139030.1 | 199 | cscsususasgsasgsususcscsascs(Tln)dAL96 | 36.9 | 5.1 | 30.7 | 3.4 | 21.2 | 5.0 | 25.2 | 3.7 |
| A-139031.1 | 200 | cscsususasgsasgs(Tlns)(m5Clns)gs(m5Clns) | 28.3 | 1.6 | 19.2 | 3.4 | 19.1 | 1.9 | 31.3 | 7.3 |
| | | us(m5Clns)(m5Cln)dAL96 | | | | | | | | |
| A-139032.1 | 201 | cscsususasgsasgs(Tlns)(Tlns)cs(m5Clns)us(m5Clns) | 46.1 | 10.7 | 46.2 | 13.8 | 29.6 | 6.6 | 20.0 | 2.3 |
| | | (m5Cln)dAL96 | | | | | | | | |
| A-139033.1 | 202 | cscsususasgsasgs(Tlns)(Tlns)cs(m5Clns)as(m5Clns) | 46.9 | 19.5 | 48.5 | 3.8 | 26.9 | 6.5 | 23.1 | 6.1 |
| | | (m5Cln)dAL96 | | | | | | | | |
| A-139034.1 | 203 | cscsususasgsasgs(Tlns)(Tlns)cs(m5Clns)us(m5Clns) | 30.8 | 11.4 | 40.7 | 12.4 | 23.6 | 3.5 | 21.6 | 5.5 |
| | | (Tln)dAL96 | | | | | | | | |
| A-139035.1 | 204 | gsasgsasususcscs(m5Clns)(m5Clns)us(m5Clns)cs | 23.3 | 3.3 | 18.1 | 3.7 | 20.9 | 1.7 | 18.2 | 2.2 |
| | | (Tlns)(m5Cln)dAL96 | | | | | | | | |
| A-139036.1 | 205 | (m5Clns)(Tlns)usasgsasgsususcscsas(m5Clns)(Tln) | 80.6 | 3.9 | 45.7 | 20.1 | 32.8 | 12.7 | 20.6 | 2.3 |
| | | dAL96 | | | | | | | | |
| A-139037.1 | 206 | (m5Clns)(Tlns)dTsdAsdGsdAsdGsdTsdTsdCsdCsd | 27.5 | 1.9 | 23.3 | 0.7 | 21.3 | 3.5 | 18.0 | 1.3 |
| | | As(m5Clns)(Tln)dAL96 | | | | | | | | |
| A-139038.1 | 207 | (m5Clns)asgs(Tlns)(Alns)cscsususasgsasgsususcs | 82.9 | 23.8 | 76.1 | 12.8 | 34.5 | 6.3 | 22.1 | 1.6 |
| | | (m5Clns)as(m5Clns)(Tln)dAL96 | | | | | | | | |
| A-139039.1 | 208 | (m5Clns)asgs(Tlns)(Alns)dCsdCsdTsdTsdAsdGsdA | 73.9 | 12.3 | 64.8 | 9.1 | 23.9 | 5.7 | 20.7 | 5.0 |
| | | sdGsdTsdTscs(m5Clns)as(m5Clns)(Tln)dAL96 | | | | | | | | |
| AD-66568 | 209 | CfsasGfuAfcCfuUfAfGfaGfuticCfaCfuAfL96 | 101.9 | 21.1 | 100.1 | 5.7 | 100.2 | 7.3 | 100.6 | 11.6 |
| | 210 | usAfsgUfgGfaAfalfcuaAfgGfuAfcUfgsasa | | | | | | | | |

### Example 2: In Vitro Reversal of Antithrombin Knockdown by Free Uptake in Primary Mouse Hepatocytes

[0791] In vitro assay: siRNA Transfection followed by REVERSIR Free Uptake: Mouse primary hepatocytes were transfected with 1 nM siRNA by adding 4.9 μL of Opti-MEM plus 0.1 L of Lipofectamine RNAiMax per well (Invitrogen, Carlsbad CA. cat #13778-150) to 5 μL siRNA per well into a 384-well plate and incubated at room temperature for 15 minutes. 40 μL of William's media containing ˜5×10³ cells were then added to the siRNA mixture, yielding a final siRNA concentration of 1 nM. Cells were incubated at 37° C. After 4 h, hepatocytes were washed and REVERSIR compounds were added by free uptake in 50 μL media for 48 h at 37° C.

[0792] Total RNA isolation using DYNABEADS mRNA Isolation Kit: RNA was isolated from hepatocytes by using an automated protocol on a BioTek-EL406 platform using DYNABEADs (Invitrogen, cat #61012). Briefly, 50 μL of Lysis/Binding Buffer and 25 μL of lysis buffer containing 3 μL of magnetic beads were added to the plate with cells. Plates were incubated on an electromagnetic shaker for 10 minutes at room temperature and then magnetic beads were captured and the supernatant was removed. Bead-bound RNA was then washed 2 times with 150 μL Wash Buffer A and once with Wash Buffer B. Beads were then washed with 150 μL Elution Buffer, re-captured and supernatant removed.

[0793] cDNA synthesis using ABI High capacity cDNA reverse transcription kit (Applied Biosystems, Foster City, CA, Cat #4368813): 10 μL of a master mix containing 1 μL 10× Buffer, 0.4 μL 25×dNTPs, 1 μL 10× Random primers, 0.5 μL Reverse Transcriptase, 0.5 μL RNase inhibitor and 6.6 μL of water per reaction was added to RNA isolated above. Plates were sealed, mixed, and incubated on an electromagnetic shaker for 10 minutes at room temperature, followed by 2 h 37° C.

[0794] Real time PCR: 2 μL of cDNA were added to a master mix containing 0.5 μL of GAPDH TaqMan Probe, 0.5 μL RVR probe (Mm01302526_m1) and 5 μL Lightcycler 480 probe master mix (Roche Cat #04887301001) per well in a 384 well plates (Roche cat #04887301001). Real time PCR was done in a LightCycler480 Real Time PCR system (Roche) using the ΔΔCt(RQ) assay. Each REVERSIR was tested in four independent transfections.

[0795] To calculate relative fold change, real time data were analyzed using the ΔΔCt method and normalized to assays performed with cells transfected with 10 nM AD-1955, or mock transfected cells. Results are shown in FIGS. 3-14.

### Example 3: In Vitro Reversal of Factor IX Knockdown

[0796] Results are shown in FIGS. 15-21.

### Example 4: REVERSIR Compounds are Well Tolerated In Vivo

[0797] As shown in FIG. 23, the various REVERSIR compounds tested for in vivo toxicity showed little or no change in body weight gain. Further, no liver enzyme elevation was observed across dosses, e.g., 20 and 100 mg/kg. Moreover, no liver enzyme elevation was observed across time points, e.g., day 4 and day 8. Thus, the REVERSIR compounds of the invention have good in vivo tolerability and safety profile.

### Example 5: Reversal of Antithrombin Knockdown by REVERSIR Compounds in Non-Human Primates

[0798] A single dose exploratory pharmacology study of REVERSIR compounds was carried out in male Cynomolgus monkeys.

### Experimental Design

[0799] Animals judged to be suitable for testing were arbitrarily assigned to the study and arranged in seven groups as shown in Table 9. One day 0 (the first day of dosing), all animals received a single subcutaneous dose of antithrombin siRNA (ALN-AT3SC). The pharmacology and toxicology of ALN-AT3SC has previously been evaluated in rodents, dog, rabbit and non-human primate (cynomolgus monkey). Thus, single administration of 7.5 mg/kg was expected to be well-tolerated with no adverse physiological or histological effects.

TABLE 9

| | ALN-AT3SC | | Dose | Number |
|---|---|---|---|---|
| Group | Dose Level | Concentration | Volume | of |
| Number | (mg/kg) | (mg/mL) | (mL/kg) | [symbol] |
| 1 | 7.5 | 3.75 | 2 | 3 |
| 2 | 7.5 | 3.75 | 2 | 3 |
| 3 | 7.5 | 3.75 | 2 | 3 |
| 4 | 7.5 | 3.75 | 2 | 3 |
| 5 | 7.5 | 3.75 | 2 | 3 |
| 6 | 7.5 | 3.75 | 2 | 3 |
| 7 | 7.5 | 3.75 | 2 | 3 |

[symbol]

indicates data missing or illegible when filed

[0800] One day 14, animals received a single subcutaneous dose of REVERSIR compounds (A-138959, A-140340 or A-140337) or saline as shown in Table 10. The dose levels of the REVERSIR compounds replicated levels previously evaluated in subcutaneous pharmacokinetic/pharmacodynamic studies in mice.

TABLE 10

| | | Test | | | |
|---|---|---|---|---|---|
| | | Article | | | |
| | | Dose | | Dose | |
| Group | | Level | Concentration | Volume | Number of |
| Number | Test Article | (mg/kg [symbol] | (mg/mL) | (mL/kg) | Males |
| 1 | 0.9% Saline | 0 | 0 | 2 | 3 |
| 2 | A-138959 | 0.25 | 0.125 | 2 | 3 |
| 3 | A-138959 | 2.5 | 1.25 | 2 | 3 |
| 4 | A-140340 | 0.25 | 0.125 | 2 | 3 |
| 5 | A-140340 | 2.5 | 1.25 | 2 | 3 |
| 6 | A-140337 | 0.25 | 0.125 | 2 | 3 |
| 7 | A-140337 | 2.5 | 1.25 | 2 | 3 |

[symbol]

indicates data missing or illegible when filed

[0801] All subcutaneous doses were performed with the appropriately sized syringe per standard operating procedure. Following administration on day 14, animals were maintained on study for a 6-week non-dosing period.

### Pharmacokinetics

[0802] Animals receiving the REVERSIR compounds were bled 2 and 8 hours post-dose on day 14 and once on days 15, 16, 17, 18 and 21. About 1.0 ml of blood (per time point) was collected from the femoral or other suitable vein. K₂EDTA was used as the anticoagulant. Samples were kept chilled (wet ice, as appropriate) during collection and during processing. The samples were centrifuged 2400-2700 rpm at approximately 4° C. for approximately 10 minutes. The maximum amount of plasma recovered was divided into two approximately equal volume aliquots into appropriately labeled tubes. Aliquoted sample were designated as “Aliquot 1” or “Aliquot 2”. Both sets of samples were maintained frozen (−65° C. to −85° C.) until bioanalytical evaluation.

### Pharmacodynamics (Plasma AT)

[0803] All animals were bled twice during pretest (Days −5 and −2) and on days 0, 7, 14, 15, 16, 17, 18, 21, 28, 35, 42, 49, and 56. About 1.0 ml of blood (per time point) was collected from the femoral or other suitable vein. K₂EDTA was used as the anticoagulant. Samples were kept chilled (wet ice, as appropriate) during collection and during processing. The samples were centrifuged 2400-2700 rpm at approximately 4° C. for approximately 10 minutes. The maximum amount of plasma recovered was divided into two approximately equal volume aliquots into appropriately labeled tubes. Aliquoted sample were designated as “Aliquot 1” or “Aliquot 2”. Both sets of samples were maintained frozen (−65° C. to −85° C.) until evaluation of plasma antithrombin via ELISA.

### Immunostimulation (Plasma Cytokines)

[0804] All animals receiving the REVERSIR compounds on day 14 prior to dosing and at 4 and 24 hours post-dosing. About 0.6 ml of blood (per time point) was collected from the femoral or other suitable vein. K₂EDTA was used as the anticoagulant. Samples were kept chilled (wet ice, as appropriate) during collection and during processing. The samples were centrifuged 2400-2700 rpm at approximately 4° C. for approximately 10 minutes. The maximum amount of plasma recovered was divided into two approximately equal volume aliquots into appropriately labeled tubes. Aliquoted sample were designated as “Aliquot 1” or “Aliquot 2”. Both sets of samples were maintained frozen (−65° C. to −85° C.) until evaluation of plasma cytokines/chemokines by multiplex assay.

[0805] Clinical pathology: During pretest and on days 16 and 56, various hematology and serum chemistry parameters were evaluated from all animals (Groups 1-7) once during the pretest period and on days 16 and 56 as a clinical pathology screen for the purpose of animal selection/confirmation of health. Blood samples were collected from fasted animals via a femoral vein (or other suitable vein). The anticoagulant used was K₂EDTA for the hematology samples and sodium citrate for the coagulation samples. Samples for serum chemistry were collected without anticoagulant.

[0806] Hematology parameters included differential leukocyte count, erythrocyte count, hemoglobin, hemoglobin distribution width hematocrit, mean corpuscular hemoglobin, mean corpuscular volume, mean corpuscular hemoglobin concentration, platelet count, red cell distribution width, reticulocyte count and total leukocyte count.

[0807] Serum chemistry parameters included alanine aminotransferase, albumin, alkaline phosphatase, albumin/globulin ratio (calculated), aspartate aminotransferase, calcium chloride, creatinine, gamma glutamyltransferase, globulin (calculated), glucose, phosphorus, potassium, sodium, sorbitol dehydrogenase, total bilirubin, total cholesterol, total protein, triglycerides, urea nitrogen, and appearance.

[0808] As shown in FIG. 24, the tested exemplary REVERSIR compounds reversed the activity of the antithrombin siRNA in non-human primates. In FIG. 24, REVERSIR compounds were administered at a dose of 2.5 mg/kg (0.75 molar eq. of the siRNA, ALN-AT3). Surprisingly, REVERSIR A-140340 (a 9-mer with low phosphorothioate content, 5 PS) showed complete reversal of ALN-AT3 activity within 4 days of dosing and was active at 30-fold lower dose than the conjugate (13 molar eq.) (data not shown).

[0809] Abbreviations used in describing the sequences, e.g., sequences described in Tables 2-8 are collected and described in Table 11 for convenience.

TABLE 11
Abbreviations of nucleotide monomers used in nucleic acid sequence
representation.

| Abbreviation | Nucleotide(s) |
|---|---|
| A | Adenosine-3′-phosphate |
| Ab | beta-L-adenosine-3′-phosphate |
| Af | 2′-fluoroadenosine-3′-phosphate |
| Afs | 2′-fluoroadenosine-3′-phosphorothioate |
| As | adenosine-3′-phosphorothioate |
| C | cytidine-3′-phosphate |
| Cb | beta-L-cytidine-3′-phosphate |
| Cf | 2′-fluorocytidine-3′-phosphate |
| Cfs | 2′-fluorocytidine-3′-phosphorothioate |
| Cs | cytidine-3′-phosphorothioate |
| G | guanosine-3′-phosphate |
| Gb | beta-L-guanosine-3′-phosphate |
| Gbs | beta-L-guanosine-3′-phosphorothioate |
| Gf | 2′-fluoroguanosine-3′-phosphate |
| Gfs | 2′-fluoroguanosine-3′-phosphorothioate |
| Gs | guanosine-3′-phosphorothioate |
| T | 5′-methyluridine-3′-phosphate |
| Tf | 2′-fluoro-5-methyluridine-3′-phosphate |
| Tfs | 2′-fluoro-5-methyluridine-3′-phosphorothioate |
| Ts | 5-methyluridine-3′-phosphorothioate |
| U | Uridine-3′-phosphate |
| Uf | 2′-fluorouridine-3′-phosphate |
| Ufs | 2′-fluorouridine-3′-phosphorothioate |
| Us | uridine-3′-phosphorothioate |
| N | any nucleotide (G, A, C, T or U) |
| a | 2′-O-methyladenosine-3′-phosphate |
| as | 2′-O-methyladenosine-3′-phosphorothioate |
| c | 2′-O-methylcytidine-3′-phosphate |
| cs | 2′-O-methylcytidine-3′-phosphorothioate |
| g | 2′-O-methylguanosine-3′-phosphate |
| gs | 2′-O-methylguanosine-3′-phosphorothioate |
| t | 2′-O-methyl-5-methyluridine-3′-phosphate |
| ts | 2′-O-methyl-5-methyluridine-3′-phosphorothioate |
| u | 2′-O-methyluridine-3′-phosphate |
| us | 2′-O-methyluridine-3′-phosphorothioate |
| dT | 2′-deoxythymidine |
| dTs | 2′-deoxythymidine-3′-phosphorothioate |
| dU | 2′-deoxyuridine |
| s | phosphorothioate linkage |
| L96 | N-[tris(GalNAc-alkyl)-amidodecanoyl)]-4-hydroxyprolinol |
| | Hyp-(GalNAc-alkyl)3 |
| (Aeo) | 2′-O-methoxyethyladenosine-3′-phosphate |
| (Aeos) | 2′-O-methoxyethyladenosine-3′-phosphorothioate |
| (Geo) | 2′-O-methoxyethylguanosine-3′-phosphate |
| (Geos) | 2′-O-methoxyethylguanosine-3′-phosphorothioate |
| (Teo) | 2′-O-methoxyethyl-5-methyluridine-3′-phosphate |
| (Teos) | 2′-O-methoxyethyl-5-methyluridine-3′-phosphorothioate |
| (m5Ceo) | 2′-O-methoxyethyl-5-methylcytidine-3′-phosphate |
| (m5Ceos) | 2′-O-methoxyethyl-5-methylcytidine-3′-phosphorothioate |
| (A3m) | 3′-O-methyladenosine-2′-phosphate |
| (A3mx) | 3′-O-methyl-xylofuranosyladenosine-2′-phosphate |
| (G3m) | 3′-O-methylguanosine-2′-phosphate |
| (G3mx) | 3′-O-methyl-xylofuranosylguanosine-2′-phosphate |
| (C3m) | 3′-O-methylcytidine-2′-phosphate |
| (C3mx) | 3′-O-methyl-xylofuranosylcytidine-2′-phosphate |
| (U3m) | 3′-O-methyluridine-2′-phosphate |
| (U3mx) | 3′-O-methylxylouridine-2′-phosphate |
| (Chd) | 2′-O-hexadecyl-cytidine-3′-phosphate |
| (pshe) | Hydroxyethylphosphorothioate |
| (Uhd) | 2′-O-hexadecyl-uridine-3′-phosphate |
| (Tgn) | Thymidine-glycol nucleic acid (GNA) S-Isomer |
| (Cgn) | Cytidine-glycol nucleic acid (GNA) |
| (Chd) | 2′-O-hexadecyl-cytidine-3′-phosphate |
| (Ggn) | 2′-O-hexadecyl-cytidine-3′-phosphate |
| (Agn) | Adenosine-glycol nucleic acid (GNA) |
| P | 5′-phosphate |
| (m5Cam) | 2′-O-(N-methylacetamide)-5-methylcytidine-3′-phosphate |
| (m5Cams) | 2′-O-(N-methylacetamide)-5-methylcytidine-3′-phosphorothioate |
| (Tam) | 2′-O-(N-methylacetamide)thymidine-3′-phosphate |
| (Tams) | 2′-O-(N-methylacetamide)thymidine-3′-phosphorothioate |
| (Aam) | 2′-O-(N-methylacetamide)adenosine-3′-phosphate |
| (Aams) | 2′-O-(N-methylacetamide)adenosine-3′-phosphorothioate |
| (Gam) | 2′-O-(N-methylacetamide)guanosine-3′-phosphate |
| (Gams) | 2′-O-(N-methylacetamide)guanosine-3′-phosphorothioate |
| Y44 | 2-hydroxymethyl-tetrahydrofurane-5-phosphate |
| Q173 | N-((GalNAc)-amidopentanoyl)-prolinol-4-phosphate (Hyp-C5-(GalNAc)) |

[0810] All patents and other publications identified in the specification and examples are expressly incorporated herein by reference for all purposes. These publications are provided solely for their disclosure prior to the filing date of the present application. Nothing in this regard should be construed as an admission that the inventors are not entitled to antedate such disclosure by virtue of prior invention or for any other reason. All statements as to the date or representation as to the contents of these documents is based on the information available to the applicants and does not constitute any admission as to the correctness of the dates or contents of these documents.

[0811] Although preferred embodiments have been depicted and described in detail herein, it will be apparent to those skilled in the relevant art that various modifications, additions, substitutions, and the like can be made without departing from the spirit of the invention and these are therefore considered to be within the scope of the invention as defined in the claims which follow. Further, to the extent not already indicated, it will be understood by those of ordinary skill in the art that any one of the various embodiments herein described and illustrated can be further modified to incorporate features shown in any of the other embodiments disclosed herein.

What is claimed is:

1. A method of inhibiting the activity of a siRNA comprising identifying a subject that has received a siRNA and administering to said subject a REVERSIR compound comprising a modified oligonucleotide consisting of 6 to 25 linked nucleotides and having a nucleobase sequence substantially complementary to antisense strand of the siRNA.

2. The method of claim 1, wherein the subject is a mammal.

3. The method of claim 2, wherein the subject is a human.

4. A method of inhibiting the activity of a siRNA in a cell comprising contacting the cell with a REVERSIR compound comprising a modified oligonucleotide consisting of 6 to 25 linked nucleotides and having a nucleobase sequence substantially complementary to antisense strand of the siRNA.

5. The method of claim 4, wherein said the cell is in vivo.

6. The method of claim 5, wherein the cell is in a mammal.

7. The method of claim 6, wherein the mammal is a human.

8. The method of claim 4, wherein said contacting is in in vivo.

9. A method comprising:
contacting a cell with a siRNA;
detecting siRNA activity; and
contacting the cell with a REVERSIR compound.

10. The method of claim 9, wherein the REVERSIR compound comprises a modified oligonucleotide consisting of 6 to 25 linked nucleotides and having a nucleobase sequence substantially complementary to antisense strand of the siRNA.

11. The method of claim 10, wherein the detecting siRNA activity comprises measuring a parameter selected from the group consisting of an amount of target mRNA present, an amount of target protein present, and an activity of a target protein.

12. A method of inhibiting a side-effect of siRNA treatment comprising:
contacting a cell with a siRNA;
detecting a side-effect;
contacting the cell with a REVERSIR compound; and
thereby inhibiting the side-effect of the siRNA.

13. The method of claim 12, wherein the REVERSIR compound comprises a modified oligonucleotide consisting of 6 to 25 linked nucleotides and having a nucleobase sequence substantially complementary to antisense strand of the siRNA.

14. A method of treating a subject comprising:
administering to the subject a siRNA;
monitoring the subject for siRNA activity;
if the siRNA activity becomes higher than desired, administering a REVERSIR compound to the subject.

15. The method of claim 14, wherein the REVERSIR compound comprises a modified oligonucleotide consisting of 6 to 25 linked nucleotides and having a nucleobase sequence substantially complementary to antisense strand of the siRNA.

16. The method of claim 14, wherein the monitoring siRNA activity comprises measuring a parameter selected from the group consisting of an amount of target mRNA present, an amount of target protein present, and an activity of a target protein.

17. The method of claim 14 further comprising detecting REVERSIR activity after administration of the REVERSIR compound.

18. The method of claim 14, wherein the subject is a mammal.

19. The method of claim 18, wherein the subject is a human.

20. A method of treating a subject comprising:
administering to the subject a siRNA;
monitoring the subject for one or more side-effect;
if one or more side-effect reaches an undesirable level, administering a REVERSIR compound to the subject.

21. The method of claim 20, wherein the REVERSIR compound comprises a modified oligonucleotide consisting of 6 to 25 linked nucleotides and having a nucleobase sequence substantially complementary to antisense strand of the siRNA.

22. The method of claim 21, wherein the subject is a mammal.

23. The method of claim 22, wherein the subject is a human.

24. The method of any of claims 1-23, wherein the REVERSIR compound is encapsulated in a lipid formulation.

25. The method of any of claims 1-24, wherein the REVERSIR compound is administered via administered via intravenous administration (IV) or via subcutaneous administration (SC).

26. The method of any of claims 1-25, wherein the REVERSIR compound is conjugated with a ligand.

27. The method of any of claims 1-26, wherein the siRNA is a conjugated with a ligand.

28. A REVERSIR compound comprising a modified oligonucleotide consisting of 6 to 20 linked nucleotides and having a nucleobase sequence substantially complementary to antisense strand of a siRNA.

29. The REVERSIR compound of claim 28, wherein the modified oligonucleotide consists of 8-15 linked nucleotides.

30. The REVERSIR compound of claim 28, wherein the modified oligonucleotide is a single-stranded oligonucleotide having at least 90% complementary to the antisense strand.

31. The REVERSIR compound of claim 28, wherein the modified oligonucleotide is substantially complementary to nucleotides 2-16 of the antisense stand.

32. The REVERSIR compound of claim 28, wherein the modified oligonucleotide is fully complementary to the antisense strand.

33. The REVERSIR compound of claim 28, wherein the modified oligonucleotide comprises at least one modified internucleotide linkage.

34. The REVERSIR compound of claim 28, wherein the modified oligonucleotide comprises at least one modified internucleotide linkage and at least one unmodified internucleotide linkage.

35. The REVERSIR compound of claim 34, wherein the modified oligonucleotide comprises an unmodified internucleotide linkage between the 3′-terminus nucleotide and the penultimate nucleoside.

36. The REVERSIR compound of claim 28, wherein the modified oligonucleotide comprises at least one modified nucleobase.

37. The REVERSIR compound of claim 28, wherein the modified oligonucleotide comprises at least one modified sugar.

38. The REVERSIR compound of claim 37, wherein said at least one modified sugar is a bicyclic sugar.

39. The REVERSIR compound of claim 28, wherein the modified oligonucleotide comprises at least one nucleotide wherein 2′ position of furanosyl is connected to the 4′ position by a linker selected independently from —[C(R1)(R2)]ₙ—, —[C(R1)(R2)]ₙ—O—, —[C(R1)(R2)]ₙ—N(R1)—, —[C(R1)(R2)]ₙ—N(R1)—O—, [C(R1R2)]ₙ—O—N(R1)—, —C(R1)═C(R2)—O—, —C(R1)═N—, —C(R1)═N—O—, C(═NR₁)—, C(═NR₁)—O—, C(═O)—, C(═O)O—, C(═S)—, C(═S)O—, C(═S)S—, —O—, Si(R1)₂—, S(═O)ₓ—and N(R1)—,
wherein:
x is 0, 1, or 2;
n is 1, 2, 3, or 4;
each R1 and R2 is, independently, H, a protecting group, hydroxyl, C1-C12 alkyl, substituted C1-C12 alkyl, C2-C12 alkenyl, substituted C2-C12 alkenyl, C2-C12 alkynyl, substituted C2-C12 alkynyl, C5-C20 aryl, substituted C5-C20 aryl, heterocycle radical, substituted heterocycle radical, heteroaryl, substituted heteroaryl, C5-C7 alicyclic radical, substituted C5-C7 alicyclic radical, halogen, OJ1, NJ1J2, SJ1, N3, COOJ1, acyl (C(═O)—H), substituted acyl, CN, sulfonyl (S(═O)₂-J1), or sulfoxyl (S(═O)-J1); and
each J1 and J2 is, independently, H, C1-C12 alkyl, substituted C1-C12 alkyl, C2-C12 alkenyl, substituted C2-C12 alkenyl, C2-C12 alkynyl, substituted C2-C12 alkynyl, C5-C20 aryl, substituted C5-C20 aryl, acyl (C(═O)—H), substituted acyl, a heterocycle radical, a substituted heterocycle radical, C1-C12 aminoalkyl, substituted C1-C12 aminoalkyl or a protecting group.

40. The REVERSIR compound of claim 28, wherein the modified oligonucleotide is conjugated with a ligand.

41. The REVERSIR compound of claim 28, wherein the modified oligonucleotide is conjugated with a ligand of structure:

[chemical structure]

42. The REVERSIR compound of claim 28, wherein the modified oligonucleotide is conjugated with a ligand and the ligand is conjugated to 3′-terminus of the modified oligonucleotide.

43. The REVERSIR compound of claim 28, wherein the modified oligonucleotide is conjugated with a ligand and the ligand is conjugated to a nucleoside with a deoxy sugar in the REVERSIR compound.

44. The REVERSIR compound of claim 43, wherein said deoxy sugar is a 2′-deoxy ribose.

45. The REVERSIR compound of claim 28, wherein the siRNA is targeted to an mRNA, a pre-mRNA, a micro-RNA a pre-micro-RNA.

46. The REVERSIR compound of claim 28, wherein the siRNA is conjugated with a ligand.

47. A kit comprising a REVERSIR compound.

48. A kit comprising a siRNA and a REVERSIR compound

The application's sequence listing, which the Patent Office published only in electronic form, follows.

SEQUENCE LISTING (245 sequences)

SEQ ID NO: 1 - DNA, 23 bp, synthetic construct
  source 1..23: mol_type = other DNA
  modified_base 1: mod_base = OTHER; note = 2'-O-methylcytidine-3'-phosphate
  modified_base 2: mod_base = OTHER; note = 2'-O-methyluridine-3'-phosphate
  modified_base 3: mod_base = OTHER; note = 2'-O-methylguanosine-3'-phosphate
  modified_base 4: mod_base = OTHER; note = 2'-O-methylguanosine-3'-phosphate
  modified_base 5: mod_base = OTHER; note = 2'-O-methyluridine-3'-phosphate
  modified_base 6: mod_base = OTHER; note = 2'-O-methyluridine-3'-phosphate
  modified_base 7: mod_base = OTHER; note = 2'-O-methyladenosine-3'-phosphate
  modified_base 8: mod_base = OTHER; note = 2'-O-methyladenosine-3'-phosphate
  modified_base 9: mod_base = OTHER; note = 2'-O-methylcytidine-3'-phosphate
  modified_base 10: mod_base = OTHER; note = 2'-O-methyladenosine-3'-phosphate
  modified_base 11: mod_base = OTHER; note = 2'-O-methylcytidine-3'-phosphate
  modified_base 12: mod_base = OTHER; note = 2'-O-methylcytidine-3'-phosphate
  modified_base 13: mod_base = OTHER; note = 2'-O-methyladenosine-3'-phosphate
  modified_base 14: mod_base = OTHER; note = 2'-O-methyluridine-3'-phosphate
  modified_base 15: mod_base = OTHER; note = 2'-O-methyluridine-3'-phosphate
  modified_base 16: mod_base = OTHER; note = 2'-O-methyluridine-3'-phosphate
  modified_base 17: mod_base = OTHER; note = 2'-O-methyladenosine-3'-phosphate
  modified_base 18: mod_base = OTHER; note = 2'-O-methylcytidine-3'-phosphate
  modified_base 19: mod_base = OTHER; note = 2'-O-methyluridine-3'-phosphate
  modified_base 20: mod_base = OTHER; note = 2'-O-methyluridine-3'-phosphate
  modified_base 21: mod_base = OTHER; note = 2'-O-methylcytidine-3'-phosphate
  modified_base 22: mod_base = OTHER; note = 2'-O-methyladenosine-3'-phosphate
  modified_base 23: mod_base = OTHER; note = 2'-deoxyadenosine-3'-phosphate ((2S,4R)-1-[29-[[2-(acetylamino)-2-deoxy-beta-D-galactopyra nosyl]oxy]-14,14-bis[[3-[[3-[[5-[[2-(acetylamino)-2-deoxy-b eta-D-galactopyranosyl]oxy]-1-oxopentyl]amino]propyl]amino] -3-oxopropoxy]methyl]-1,12,19,25-tetraoxo-16-oxa-13,20,24-t riazanonacos-1-yl]-4-hydroxy-2-pyrrolidinyl)methyl ester
  misc_feature 1..22: note = RNA
  misc_feature 23: note = DNA
ctggttaacaccatttacttcaa

SEQ ID NO: 2 - DNA, 23 bp, synthetic construct
  source 1..23: mol_type = other DNA
  modified_base 1: mod_base = OTHER; note = 2'-O-methylcytidine-3'-phosphorothioate
  modified_base 2: mod_base = OTHER; note = 2'-O-methyluridine-3'-phosphorothioate
  modified_base 3: mod_base = OTHER; note = 2'-O-methylguanosine-3'-phosphate
  modified_base 4: mod_base = OTHER; note = 2'-O-methylguanosine-3'-phosphate
  modified_base 5: mod_base = OTHER; note = 2'-O-methyluridine-3'-phosphate
  modified_base 6: mod_base = OTHER; note = 2'-O-methyluridine-3'-phosphate
  modified_base 7: mod_base = OTHER; note = 2'-O-methyladenosine-3'-phosphate
  modified_base 8: mod_base = OTHER; note = 2'-O-methyladenosine-3'-phosphate
  modified_base 9: mod_base = OTHER; note = 2'-O-methylcytidine-3'-phosphate
  modified_base 10: mod_base = OTHER; note = 2'-O-methyladenosine-3'-phosphate
  modified_base 11: mod_base = OTHER; note = 2'-O-methylcytidine-3'-phosphate
  modified_base 12: mod_base = OTHER; note = 2'-O-methylcytidine-3'-phosphate
  modified_base 13: mod_base = OTHER; note = 2'-O-methyladenosine-3'-phosphate
  modified_base 14: mod_base = OTHER; note = 2'-O-methyluridine-3'-phosphate
  modified_base 15: mod_base = OTHER; note = 2'-O-methyluridine-3'-phosphate
  modified_base 16: mod_base = OTHER; note = 2'-O-methyluridine-3'-phosphate
  modified_base 17: mod_base = OTHER; note = 2'-O-methyladenosine-3'-phosphate
  modified_base 18: mod_base = OTHER; note = 2'-O-methylcytidine-3'-phosphate
  modified_base 19: mod_base = OTHER; note = 2'-O-methyluridine-3'-phosphate
  modified_base 20: mod_base = OTHER; note = 2'-O-methyluridine-3'-phosphorothioate
  modified_base 21: mod_base = OTHER; note = 2'-O-methylcytidine-3'-phosphorothioate
  modified_base 22: mod_base = OTHER; note = 2'-O-methyladenosine-3'-phosphate
  modified_base 23: mod_base = OTHER; note = 2'-deoxyadenosine-3'-phosphate ((2S,4R)-1-[29-[[2-(acetylamino)-2-deoxy-beta-D-galactopyra nosyl]oxy]-14,14-bis[[3-[[3-[[5-[[2-(acetylamino)-2-deoxy-b eta-D-galactopyranosyl]oxy]-1-oxopentyl]amino]propyl]amino] -3-oxopropoxy]methyl]-1,12,19,25-tetraoxo-16-oxa-13,20,24-t riazanonacos-1-yl]-4-hydroxy-2-pyrrolidinyl)methyl ester
  misc_feature 1..22: note = RNA
  misc_feature 23: note = DNA
ctggttaacaccatttacttcaa

SEQ ID NO: 3 - DNA, 23 bp, synthetic construct
  source 1..23: mol_type = other DNA
  modified_base 1: mod_base = OTHER; note = 2'-O-methylcytidine-3'-phosphorothioate
  modified_base 2: mod_base = OTHER; note = 2'-O-methyluridine-3'-phosphorothioate
  modified_base 3: mod_base = OTHER; note = 2'-O-methylguanosine-3'-phosphorothioate
  modified_base 4: mod_base = OTHER; note = 2'-O-methylguanosine-3'-phosphorothioate
  modified_base 5: mod_base = OTHER; note = 2'-O-methyluridine-3'-phosphorothioate
  modified_base 6: mod_base = OTHER; note = 2'-O-methyluridine-3'-phosphorothioate
  modified_base 7: mod_base = OTHER; note = 2'-O-methyladenosine-3'-phosphorothioate
  modified_base 8: mod_base = OTHER; note = 2'-O-methyladenosine-3'-phosphorothioate
  modified_base 9: mod_base = OTHER; note = 2'-O-methylcytidine-3'-phosphorothioate
  modified_base 10: mod_base = OTHER; note = 2'-O-methyladenosine-3'-phosphorothioate
  modified_base 11: mod_base = OTHER; note = 2'-O-methylcytidine-3'-phosphorothioate
  modified_base 12: mod_base = OTHER; note = 2'-O-methylcytidine-3'-phosphorothioate
  modified_base 13: mod_base = OTHER; note = 2'-O-methyladenosine-3'-phosphorothioate
  modified_base 14: mod_base = OTHER; note = 2'-O-methyluridine-3'-phosphorothioate
  modified_base 15: mod_base = OTHER; note = 2'-O-methyluridine-3'-phosphorothioate
  modified_base 16: mod_base = OTHER; note = 2'-O-methyluridine-3'-phosphorothioate
  modified_base 17: mod_base = OTHER; note = 2'-O-methyladenosine-3'-phosphorothioate
  modified_base 18: mod_base = OTHER; note = 2'-O-methylcytidine-3'-phosphorothioate
  modified_base 19: mod_base = OTHER; note = 2'-O-methyluridine-3'-phosphorothioate
  modified_base 20: mod_base = OTHER; note = 2'-O-methyluridine-3'-phosphorothioate
  modified_base 21: mod_base = OTHER; note = 2'-O-methylcytidine-3'-phosphorothioate
  modified_base 22: mod_base = OTHER; note = 2'-O-methyladenosine-3'-phosphate
  modified_base 23: mod_base = OTHER; note = 2'-deoxyadenosine-3'-phosphate ((2S,4R)-1-[29-[[2-(acetylamino)-2-deoxy-beta-D-galactopyra nosyl]oxy]-14,14-bis[[3-[[3-[[5-[[2-(acetylamino)-2-deoxy-b eta-D-galactopyranosyl]oxy]-1-oxopentyl]amino]propyl]amino] -3-oxopropoxy]methyl]-1,12,19,25-tetraoxo-16-oxa-13,20,24-t riazanonacos-1-yl]-4-hydroxy-2-pyrrolidinyl)methyl ester
  misc_feature 1..22: note = RNA
  misc_feature 23: note = DNA
ctggttaacaccatttacttcaa

SEQ ID NO: 4 - DNA, 20 bp, synthetic construct
  source 1..20: mol_type = other DNA
  modified_base 1: mod_base = OTHER; note = 2'-O-methylguanosine-3'-phosphorothioate
  modified_base 2: mod_base = OTHER; note = 2'-O-methyluridine-3'-phosphorothioate
  modified_base 3: mod_base = OTHER; note = 2'-O-methyluridine-3'-phosphorothioate
  modified_base 4: mod_base = OTHER; note = 2'-O-methyladenosine-3'-phosphorothioate
  modified_base 5: mod_base = OTHER; note = 2'-O-methyladenosine-3'-phosphorothioate
  modified_base 6: mod_base = OTHER; note = 2'-O-methylcytidine-3'-phosphorothioate
  modified_base 7: mod_base = OTHER; note = 2'-O-methyladenosine-3'-phosphorothioate
  modified_base 8: mod_base = OTHER; note = 2'-O-methylcytidine-3'-phosphorothioate
  modified_base 9: mod_base = OTHER; note = 2'-O-methylcytidine-3'-phosphorothioate
  modified_base 10: mod_base = OTHER; note = 2'-O-methyladenosine-3'-phosphorothioate
  modified_base 11: mod_base = OTHER; note = 2'-O-methyluridine-3'-phosphorothioate
  modified_base 12: mod_base = OTHER; note = 2'-O-methyluridine-3'-phosphorothioate
  modified_base 13: mod_base = OTHER; note = 2'-O-methyluridine-3'-phosphorothioate
  modified_base 14: mod_base = OTHER; note = 2'-O-methyladenosine-3'-phosphorothioate
  modified_base 15: mod_base = OTHER; note = 2'-O-methylcytidine-3'-phosphorothioate
  modified_base 16: mod_base = OTHER; note = 2'-O-methyluridine-3'-phosphorothioate
  modified_base 17: mod_base = OTHER; note = 2'-O-methyluridine-3'-phosphorothioate
  modified_base 18: mod_base = OTHER; note = 2'-O-methylcytidine-3'-phosphorothioate
  modified_base 19: mod_base = OTHER; note = 2'-O-methyladenosine-3'-phosphate
  modified_base 20: mod_base = OTHER; note = 2'-deoxyadenosine-3'-phosphate ((2S,4R)-1-[29-[[2-(acetylamino)-2-deoxy-beta-D-galactopyra nosyl]oxy]-14,14-bis[[3-[[3-[[5-[[2-(acetylamino)-2-deoxy-b eta-D-galactopyranosyl]oxy]-1-oxopentyl]amino]propyl]amino] -3-oxopropoxy]methyl]-1,12,19,25-tetraoxo-16-oxa-13,20,24-t riazanonacos-1-yl]-4-hydroxy-2-pyrrolidinyl)methyl ester
  misc_feature 1..19: note = RNA
  misc_feature 20: note = DNA
gttaacaccatttacttcaa

SEQ ID NO: 5 - DNA, 16 bp, synthetic construct
  source 1..16: mol_type = other DNA
  modified_base 1: mod_base = OTHER; note = 2'-O-methyladenosine-3'-phosphorothioate
  modified_base 2: mod_base = OTHER; note = 2'-O-methylcytidine-3'-phosphorothioate
  modified_base 3: mod_base = OTHER; note = 2'-O-methyladenosine-3'-phosphorothioate
  modified_base 4: mod_base = OTHER; note = 2'-O-methylcytidine-3'-phosphorothioate
  modified_base 5: mod_base = OTHER; note = 2'-O-methylcytidine-3'-phosphorothioate
  modified_base 6: mod_base = OTHER; note = 2'-O-methyladenosine-3'-phosphorothioate
  modified_base 7: mod_base = OTHER; note = 2'-O-methyluridine-3'-phosphorothioate
  modified_base 8: mod_base = OTHER; note = 2'-O-methyluridine-3'-phosphorothioate
  modified_base 9: mod_base = OTHER; note = 2'-O-methyluridine-3'-phosphorothioate
  modified_base 10: mod_base = OTHER; note = 2'-O-methyladenosine-3'-phosphorothioate
  modified_base 11: mod_base = OTHER; note = 2'-O-methylcytidine-3'-phosphorothioate
  modified_base 12: mod_base = OTHER; note = 2'-O-methyluridine-3'-phosphorothioate
  modified_base 13: mod_base = OTHER; note = 2'-O-methyluridine-3'-phosphorothioate
  modified_base 14: mod_base = OTHER; note = 2'-O-methylcytidine-3'-phosphorothioate
  modified_base 15: mod_base = OTHER; note = 2'-O-methyladenosine-3'-phosphate
  modified_base 16: mod_base = OTHER; note = 2'-deoxyadenosine-3'-phosphate ((2S,4R)-1-[29-[[2-(acetylamino)-2-deoxy-beta-D-galactopyra nosyl]oxy]-14,14-bis[[3-[[3-[[5-[[2-(acetylamino)-2-deoxy-b eta-D-galactopyranosyl]oxy]-1-oxopentyl]amino]propyl]amino] -3-oxopropoxy]methyl]-1,12,19,25-tetraoxo-16-oxa-13,20,24-t riazanonacos-1-yl]-4-hydroxy-2-pyrrolidinyl)methyl ester
  misc_feature 1..15: note = RNA
  misc_feature 16: note = DNA
acaccatttacttcaa

SEQ ID NO: 6 - DNA, 24 bp, synthetic construct
  source 1..24: mol_type = other DNA
  modified_base 1: mod_base = OTHER; note = 2'-O-methylcytidine-3'-phosphorothioate
  modified_base 2: mod_base = OTHER; note = 2'-O,4'-C-methylene 5-methyluridine-3'-phosphorothioate
  modified_base 3: mod_base = OTHER; note = 2'-O-methylguanosine-3'-phosphorothioate
  modified_base 4: mod_base = OTHER; note = 2'-O-methylguanosine-3'-phosphorothioate
  modified_base 5: mod_base = OTHER; note = 2'-O-methyluridine-3'-phosphorothioate
  modified_base 6: mod_base = OTHER; note = 2'-O-methyluridine-3'-phosphorothioate
  modified_base 7: mod_base = OTHER; note = 2'-O-methyladenosine-3'-phosphorothioate
  modified_base 8: mod_base = OTHER; note = 2'-O-methyladenosine-3'-phosphorothioate
  modified_base 9: mod_base = OTHER; note = 2'-O-methylcytidine-3'-phosphorothioate
  modified_base 10: mod_base = OTHER; note = 2'-O-methyladenosine-3'-phosphorothioate
  modified_base 11: mod_base = OTHER; note = 2'-O-methylcytidine-3'-phosphorothioate
  modified_base 12: mod_base = OTHER; note = 2'-O-methylcytidine-3'-phosphorothioate
  modified_base 13: mod_base = OTHER; note = 2'-O-methyladenosine-3'-phosphorothioate
  modified_base 14: mod_base = OTHER; note = 2'-O-methyluridine-3'-phosphorothioate
  modified_base 15: mod_base = OTHER; note = 2'-O-methyluridine-3'-phosphorothioate
  modified_base 16: mod_base = OTHER; note = 2'-O-methyluridine-3'-phosphorothioate
  modified_base 17: mod_base = OTHER; note = 2'-O-methyladenosine-3'-phosphorothioate
  modified_base 18: mod_base = OTHER; note = 2'-O-methylcytidine-3'-phosphorothioate
  modified_base 19: mod_base = OTHER; note = 2'-O-methyluridine-3'-phosphorothioate
  modified_base 20: mod_base = OTHER; note = 2'-O-methyluridine-3'-phosphorothioate
  modified_base 21: mod_base = OTHER; note = 2'-O-methylcytidine-3'-phosphorothioate
  modified_base 22: mod_base = OTHER; note = 2'-O,4'-C-methylene adenosine-3'-phosphorothioate
  modified_base 23: mod_base = OTHER; note = 2'-O-methyladenosine-3'-phosphate
  modified_base 24: mod_base = OTHER; note = 2'-deoxyadenosine-3'-phosphate ((2S,4R)-1-[29-[[2-(acetylamino)-2-deoxy-beta-D-galactopyra nosyl]oxy]-14,14-bis[[3-[[3-[[5-[[2-(acetylamino)-2-deoxy-b eta-D-galactopyranosyl]oxy]-1-oxopentyl]amino]propyl]amino] -3-oxopropoxy]methyl]-1,12,19,25-tetraoxo-16-oxa-13,20,24-t riazanonacos-1-yl]-4-hydroxy-2-pyrrolidinyl)methyl ester
  misc_feature 1..23: note = RNA
  misc_feature 24: note = DNA
ctggttaacaccatttacttcaaa

SEQ ID NO: 7 - DNA, 24 bp, synthetic construct
  source 1..24: mol_type = other DNA
  modified_base 1: mod_base = OTHER; note = 2'-O-methylcytidine-3'-phosphorothioate
  modified_base 2: mod_base = OTHER; note = 2'-O,4'-C-methylene 5-methyluridine-3'-phosphorothioate
  modified_base 3: mod_base = OTHER; note = 2'-O-methylguanosine-3'-phosphorothioate
  modified_base 4: mod_base = OTHER; note = 2'-O,4'-C-methylene guanosine-3'-phosphorothioate
  modified_base 5: mod_base = OTHER; note = 2'-O-methyluridine-3'-phosphorothioate
  modified_base 6: mod_base = OTHER; note = 2'-O-methyluridine-3'-phosphorothioate
  modified_base 7: mod_base = OTHER; note = 2'-O-methyladenosine-3'-phosphorothioate
  modified_base 8: mod_base = OTHER; note = 2'-O-methyladenosine-3'-phosphorothioate
  modified_base 9: mod_base = OTHER; note = 2'-O-methylcytidine-3'-phosphorothioate
  modified_base 10: mod_base = OTHER; note = 2'-O-methyladenosine-3'-phosphorothioate
  modified_base 11: mod_base = OTHER; note = 2'-O-methylcytidine-3'-phosphorothioate
  modified_base 12: mod_base = OTHER; note = 2'-O-methylcytidine-3'-phosphorothioate
  modified_base 13: mod_base = OTHER; note = 2'-O-methyladenosine-3'-phosphorothioate
  modified_base 14: mod_base = OTHER; note = 2'-O-methyluridine-3'-phosphorothioate
  modified_base 15: mod_base = OTHER; note = 2'-O-methyluridine-3'-phosphorothioate
  modified_base 16: mod_base = OTHER; note = 2'-O-methyluridine-3'-phosphorothioate
  modified_base 17: mod_base = OTHER; note = 2'-O-methyladenosine-3'-phosphorothioate
  modified_base 18: mod_base = OTHER; note = 2'-O-methylcytidine-3'-phosphorothioate
  modified_base 19: mod_base = OTHER; note = 2'-O-methyluridine-3'-phosphorothioate
  modified_base 20: mod_base = OTHER; note = 2'-O,4'-C-methylene 5-methyluridine-3'-phosphorothioate
  modified_base 21: mod_base = OTHER; note = 2'-O-methylcytidine-3'-phosphorothioate
  modified_base 22: mod_base = OTHER; note = 2'-O,4'-C-methylene adenosine-3'-phosphorothioate
  modified_base 23: mod_base = OTHER; note = 2'-O-methyladenosine-3'-phosphate
  modified_base 24: mod_base = OTHER; note = 2'-deoxyadenosine-3'-phosphate ((2S,4R)-1-[29-[[2-(acetylamino)-2-deoxy-beta-D-galactopyra nosyl]oxy]-14,14-bis[[3-[[3-[[5-[[2-(acetylamino)-2-deoxy-b eta-D-galactopyranosyl]oxy]-1-oxopentyl]amino]propyl]amino] -3-oxopropoxy]methyl]-1,12,19,25-tetraoxo-16-oxa-13,20,24-t riazanonacos-1-yl]-4-hydroxy-2-pyrrolidinyl)methyl ester
  misc_feature 1..23: note = RNA
  misc_feature 24: note = DNA
ctggttaacaccatttacttcaaa

SEQ ID NO: 8 - DNA, 24 bp, synthetic construct
  source 1..24: mol_type = other DNA
  modified_base 1: mod_base = OTHER; note = 2'-O-methylcytidine-3'-phosphorothioate
  modified_base 2: mod_base = OTHER; note = 2'-O,4'-C-methylene 5-methyluridine-3'-phosphorothioate
  modified_base 3: mod_base = OTHER; note = 2'-O-methylguanosine-3'-phosphorothioate
  modified_base 4: mod_base = OTHER; note = 2'-O,4'-C-methylene guanosine-3'-phosphorothioate
  modified_base 5: mod_base = OTHER; note = 2'-O-methyluridine-3'-phosphorothioate
  modified_base 6: mod_base = OTHER; note = 2'-O-methyluridine-3'-phosphorothioate
  modified_base 7: mod_base = OTHER; note = 2'-O-methyladenosine-3'-phosphorothioate
  modified_base 8: mod_base = OTHER; note = 2'-O-methyladenosine-3'-phosphorothioate
  modified_base 9: mod_base = OTHER; note = 2'-O-methylcytidine-3'-phosphorothioate
  modified_base 10: mod_base = OTHER; note = 2'-O-methyladenosine-3'-phosphorothioate
  modified_base 11: mod_base = OTHER; note = 2'-O-methylcytidine-3'-phosphorothioate
  modified_base 12: mod_base = OTHER; note = 2'-O-methylcytidine-3'-phosphorothioate
  modified_base 13: mod_base = OTHER; note = 2'-O-methyladenosine-3'-phosphorothioate
  modified_base 14: mod_base = OTHER; note = 2'-O-methyluridine-3'-phosphorothioate
  modified_base 15: mod_base = OTHER; note = 2'-O-methyluridine-3'-phosphorothioate
  modified_base 16: mod_base = OTHER; note = 2'-O-methyluridine-3'-phosphorothioate
  modified_base 17: mod_base = OTHER; note = 2'-O-methyladenosine-3'-phosphorothioate
  modified_base 18: mod_base = OTHER; note = 2'-O,4'-C-methylene 5-methylcytidine-3'-phosphorothioate
  modified_base 19: mod_base = OTHER; note = 2'-O-methyluridine-3'-phosphorothioate
  modified_base 20: mod_base = OTHER; note = 2'-O,4'-C-methylene 5-methyluridine-3'-phosphorothioate
  modified_base 21: mod_base = OTHER; note = 2'-O-methylcytidine-3'-phosphorothioate
  modified_base 22: mod_base = OTHER; note = 2'-O,4'-C-methylene adenosine-3'-phosphorothioate
  modified_base 23: mod_base = OTHER; note = 2'-O-methyladenosine-3'-phosphate
  modified_base 24: mod_base = OTHER; note = 2'-deoxyadenosine-3'-phosphate ((2S,4R)-1-[29-[[2-(acetylamino)-2-deoxy-beta-D-galactopyra nosyl]oxy]-14,14-bis[[3-[[3-[[5-[[2-(acetylamino)-2-deoxy-b eta-D-galactopyranosyl]oxy]-1-oxopentyl]amino]propyl]amino] -3-oxopropoxy]methyl]-1,12,19,25-tetraoxo-16-oxa-13,20,24-t riazanonacos-1-yl]-4-hydroxy-2-pyrrolidinyl)methyl ester
  misc_feature 1..23: note = RNA
  misc_feature 24: note = DNA
ctggttaacaccatttacttcaaa

SEQ ID NO: 9 - DNA, 23 bp, synthetic construct
  source 1..23: mol_type = other DNA
  modified_base 1: mod_base = OTHER; note = 2'-O-methylcytidine-3'-phosphorothioate
  modified_base 2: mod_base = OTHER; note = 2'-O,4'-C-methylene 5-methyluridine-3'-phosphorothioate
  modified_base 3: mod_base = OTHER; note = 2'-O-methylguanosine-3'-phosphorothioate
  modified_base 4: mod_base = OTHER; note = 2'-O,4'-C-methylene guanosine-3'-phosphorothioate
  modified_base 5: mod_base = OTHER; note = 2'-O-methyluridine-3'-phosphorothioate
  modified_base 6: mod_base = OTHER; note = 2'-O-methyluridine-3'-phosphorothioate
  modified_base 7: mod_base = OTHER; note = 2'-O-methyladenosine-3'-phosphorothioate
  modified_base 8: mod_base = OTHER; note = 2'-O-methyladenosine-3'-phosphorothioate
  modified_base 9: mod_base = OTHER; note = 2'-O-methylcytidine-3'-phosphorothioate
  modified_base 10: mod_base = OTHER; note = 2'-O,4'-C-methylene adenosine-3'-phosphorothioate
  modified_base 11: mod_base = OTHER; note = 2'-O-methylcytidine-3'-phosphorothioate
  modified_base 12: mod_base = OTHER; note = 2'-O-methylcytidine-3'-phosphorothioate
  modified_base 13: mod_base = OTHER; note = 2'-O-methyladenosine-3'-phosphorothioate
  modified_base 14: mod_base = OTHER; note = 2'-O-methyluridine-3'-phosphorothioate
  modified_base 15: mod_base = OTHER; note = 2'-O-methyluridine-3'-phosphorothioate
  modified_base 16: mod_base = OTHER; note = 2'-O-methyluridine-3'-phosphorothioate
  modified_base 17: mod_base = OTHER; note = 2'-O-methyladenosine-3'-phosphorothioate
  modified_base 18: mod_base = OTHER; note = 2'-O,4'-C-methylene 5-methylcytidine-3'-phosphorothioate
  modified_base 19: mod_base = OTHER; note = 2'-O-methyluridine-3'-phosphorothioate
  modified_base 20: mod_base = OTHER; note = 2'-O,4'-C-methylene 5-methyluridine-3'-phosphorothioate
  modified_base 21: mod_base = OTHER; note = 2'-O-methylcytidine-3'-phosphorothioate
  modified_base 22: mod_base = OTHER; note = 2'-O,4'-C-methylene adenosine-3'-phosphate
  modified_base 23: mod_base = OTHER; note = 2'-deoxyadenosine-3'-phosphate ((2S,4R)-1-[29-[[2-(acetylamino)-2-deoxy-beta-D-galactopyra nosyl]oxy]-14,14-bis[[3-[[3-[[5-[[2-(acetylamino)-2-deoxy-b eta-D-galactopyranosyl]oxy]-1-oxopentyl]amino]propyl]amino] -3-oxopropoxy]methyl]-1,12,19,25-tetraoxo-16-oxa-13,20,24-t riazanonacos-1-yl]-4-hydroxy-2-pyrrolidinyl)methyl ester
  misc_feature 1..22: note = RNA
  misc_feature 23: note = DNA
ctggttaacaccatttacttcaa

SEQ ID NO: 10 - DNA, 20 bp, synthetic construct
  source 1..20: mol_type = other DNA
  modified_base 1: mod_base = OTHER; note = 2'-O,4'-C-methylene guanosine-3'-phosphorothioate
  modified_base 2: mod_base = OTHER; note = 2'-O-methyluridine-3'-phosphorothioate
  modified_base 3: mod_base = OTHER; note = 2'-O-methyluridine-3'-phosphorothioate
  modified_base 4: mod_base = OTHER; note = 2'-O-methyladenosine-3'-phosphorothioate
  modified_base 5: mod_base = OTHER; note = 2'-O-methyladenosine-3'-phosphorothioate
  modified_base 6: mod_base = OTHER; note = 2'-O-methylcytidine-3'-phosphorothioate
  modified_base 7: mod_base = OTHER; note = 2'-O-methyladenosine-3'-phosphorothioate
  modified_base 8: mod_base = OTHER; note = 2'-O-methylcytidine-3'-phosphorothioate
  modified_base 9: mod_base = OTHER; note = 2'-O-methylcytidine-3'-phosphorothioate
  modified_base 10: mod_base = OTHER; note = 2'-O-methyladenosine-3'-phosphorothioate
  modified_base 11: mod_base = OTHER; note = 2'-O-methyluridine-3'-phosphorothioate
  modified_base 12: mod_base = OTHER; note = 2'-O-methyluridine-3'-phosphorothioate
  modified_base 13: mod_base = OTHER; note = 2'-O-methyluridine-3'-phosphorothioate
  modified_base 14: mod_base = OTHER; note = 2'-O-methyladenosine-3'-phosphorothioate
  modified_base 15: mod_base = OTHER; note = 2'-O-methylcytidine-3'-phosphorothioate
  modified_base 16: mod_base = OTHER; note = 2'-O-methyluridine-3'-phosphorothioate
  modified_base 17: mod_base = OTHER; note = 2'-O-methyluridine-3'-phosphorothioate
  modified_base 18: mod_base = OTHER; note = 2'-O-methylcytidine-3'-phosphorothioate
  modified_base 19: mod_base = OTHER; note = 2'-O,4'-C-methylene adenosine-3'-phosphate
  modified_base 20: mod_base = OTHER; note = 2'-deoxyadenosine-3'-phosphate ((2S,4R)-1-[29-[[2-(acetylamino)-2-deoxy-beta-D-galactopyra nosyl]oxy]-14,14-bis[[3-[[3-[[5-[[2-(acetylamino)-2-deoxy-b eta-D-galactopyranosyl]oxy]-1-oxopentyl]amino]propyl]amino] -3-oxopropoxy]methyl]-1,12,19,25-tetraoxo-16-oxa-13,20,24-t riazanonacos-1-yl]-4-hydroxy-2-pyrrolidinyl)methyl ester
  misc_feature 1..19: note = RNA
  misc_feature 20: note = DNA
gttaacaccatttacttcaa

SEQ ID NO: 11 - DNA, 20 bp, synthetic construct
  source 1..20: mol_type = other DNA
  modified_base 1: mod_base = OTHER; note = 2'-O,4'-C-methylene guanosine-3'-phosphorothioate
  modified_base 2: mod_base = OTHER; note = 2'-O-methyluridine-3'-phosphorothioate
  modified_base 3: mod_base = OTHER; note = 2'-O-methyluridine-3'-phosphorothioate
  modified_base 4: mod_base = OTHER; note = 2'-O-methyladenosine-3'-phosphorothioate
  modified_base 5: mod_base = OTHER; note = 2'-O-methyladenosine-3'-phosphorothioate
  modified_base 6: mod_base = OTHER; note = 2'-O-methylcytidine-3'-phosphorothioate
  modified_base 7: mod_base = OTHER; note = 2'-O-methyladenosine-3'-phosphorothioate
  modified_base 8: mod_base = OTHER; note = 2'-O-methylcytidine-3'-phosphorothioate
  modified_base 9: mod_base = OTHER; note = 2'-O-methylcytidine-3'-phosphorothioate
  modified_base 10: mod_base = OTHER; note = 2'-O-methyladenosine-3'-phosphorothioate
  modified_base 11: mod_base = OTHER; note = 2'-O-methyluridine-3'-phosphorothioate
  modified_base 12: mod_base = OTHER; note = 2'-O-methyluridine-3'-phosphorothioate
  modified_base 13: mod_base = OTHER; note = 2'-O-methyluridine-3'-phosphorothioate
  modified_base 14: mod_base = OTHER; note = 2'-O-methyladenosine-3'-phosphorothioate
  modified_base 15: mod_base = OTHER; note = 2'-O-methylcytidine-3'-phosphorothioate
  modified_base 16: mod_base = OTHER; note = 2'-O-methyluridine-3'-phosphorothioate
  modified_base 17: mod_base = OTHER; note = 2'-O,4'-C-methylene 5-methyluridine-3'-phosphorothioate
  modified_base 18: mod_base = OTHER; note = 2'-O-methylcytidine-3'-phosphorothioate
  modified_base 19: mod_base = OTHER; note = 2'-O,4'-C-methylene adenosine-3'-phosphate
  modified_base 20: mod_base = OTHER; note = 2'-deoxyadenosine-3'-phosphate ((2S,4R)-1-[29-[[2-(acetylamino)-2-deoxy-beta-D-galactopyra nosyl]oxy]-14,14-bis[[3-[[3-[[5-[[2-(acetylamino)-2-deoxy-b eta-D-galactopyranosyl]oxy]-1-oxopentyl]amino]propyl]amino] -3-oxopropoxy]methyl]-1,12,19,25-tetraoxo-16-oxa-13,20,24-t riazanonacos-1-yl]-4-hydroxy-2-pyrrolidinyl)methyl ester
  misc_feature 1..19: note = RNA
  misc_feature 20: note = DNA
gttaacaccatttacttcaa

SEQ ID NO: 12 - DNA, 20 bp, synthetic construct
  source 1..20: mol_type = other DNA
  modified_base 1: mod_base = OTHER; note = 2'-O,4'-C-methylene guanosine-3'-phosphorothioate
  modified_base 2: mod_base = OTHER; note = 2'-O-methyluridine-3'-phosphorothioate
  modified_base 3: mod_base = OTHER; note = 2'-O-methyluridine-3'-phosphorothioate
  modified_base 4: mod_base = OTHER; note = 2'-O-methyladenosine-3'-phosphorothioate
  modified_base 5: mod_base = OTHER; note = 2'-O-methyladenosine-3'-phosphorothioate
  modified_base 6: mod_base = OTHER; note = 2'-O-methylcytidine-3'-phosphorothioate
  modified_base 7: mod_base = OTHER; note = 2'-O-methyladenosine-3'-phosphorothioate
  modified_base 8: mod_base = OTHER; note = 2'-O-methylcytidine-3'-phosphorothioate
  modified_base 9: mod_base = OTHER; note = 2'-O-methylcytidine-3'-phosphorothioate
  modified_base 10: mod_base = OTHER; note = 2'-O-methyladenosine-3'-phosphorothioate
  modified_base 11: mod_base = OTHER; note = 2'-O-methyluridine-3'-phosphorothioate
  modified_base 12: mod_base = OTHER; note = 2'-O-methyluridine-3'-phosphorothioate
  modified_base 13: mod_base = OTHER; note = 2'-O-methyluridine-3'-phosphorothioate
  modified_base 14: mod_base = OTHER; note = 2'-O-methyladenosine-3'-phosphorothioate
  modified_base 15: mod_base = OTHER; note = 2'-O,4'-C-methylene 5-methylcytidine-3'-phosphorothioate
  modified_base 16: mod_base = OTHER; note = 2'-O-methyluridine-3'-phosphorothioate
  modified_base 17: mod_base = OTHER; note = 2'-O,4'-C-methylene 5-methyluridine-3'-phosphorothioate
  modified_base 18: mod_base = OTHER; note = 2'-O-methylcytidine-3'-phosphorothioate
  modified_base 19: mod_base = OTHER; note = 2'-O,4'-C-methylene adenosine-3'-phosphate
  modified_base 20: mod_base = OTHER; note = 2'-deoxyadenosine-3'-phosphate ((2S,4R)-1-[29-[[2-(acetylamino)-2-deoxy-beta-D-galactopyra nosyl]oxy]-14,14-bis[[3-[[3-[[5-[[2-(acetylamino)-2-deoxy-b eta-D-galactopyranosyl]oxy]-1-oxopentyl]amino]propyl]amino] -3-oxopropoxy]methyl]-1,12,19,25-tetraoxo-16-oxa-13,20,24-t riazanonacos-1-yl]-4-hydroxy-2-pyrrolidinyl)methyl ester
  misc_feature 1..19: note = RNA
  misc_feature 20: note = DNA
gttaacaccatttacttcaa

SEQ ID NO: 13 - DNA, 20 bp, synthetic construct
  source 1..20: mol_type = other DNA
  modified_base 1: mod_base = OTHER; note = 2'-O,4'-C-methylene guanosine-3'-phosphorothioate
  modified_base 2: mod_base = OTHER; note = 2'-O-methyluridine-3'-phosphorothioate
  modified_base 3: mod_base = OTHER; note = 2'-O-methyluridine-3'-phosphorothioate
  modified_base 4: mod_base = OTHER; note = 2'-O-methyladenosine-3'-phosphorothioate
  modified_base 5: mod_base = OTHER; note = 2'-O-methyladenosine-3'-phosphorothioate
  modified_base 6: mod_base = OTHER; note = 2'-O-methylcytidine-3'-phosphorothioate
  modified_base 7: mod_base = OTHER; note = 2'-O,4'-C-methylene adenosine-3'-phosphorothioate
  modified_base 8: mod_base = OTHER; note = 2'-O-methylcytidine-3'-phosphorothioate
  modified_base 9: mod_base = OTHER; note = 2'-O-methylcytidine-3'-phosphorothioate
  modified_base 10: mod_base = OTHER; note = 2'-O-methyladenosine-3'-phosphorothioate
  modified_base 11: mod_base = OTHER; note = 2'-O-methyluridine-3'-phosphorothioate
  modified_base 12: mod_base = OTHER; note = 2'-O-methyluridine-3'-phosphorothioate
  modified_base 13: mod_base = OTHER; note = 2'-O-methyluridine-3'-phosphorothioate
  modified_base 14: mod_base = OTHER; note = 2'-O-methyladenosine-3'-phosphorothioate
  modified_base 15: mod_base = OTHER; note = 2'-O,4'-C-methylene 5-methylcytidine-3'-phosphorothioate
  modified_base 16: mod_base = OTHER; note = 2'-O-methyluridine-3'-phosphorothioate
  modified_base 17: mod_base = OTHER; note = 2'-O,4'-C-methylene 5-methyluridine-3'-phosphorothioate
  modified_base 18: mod_base = OTHER; note = 2'-O-methylcytidine-3'-phosphorothioate
  modified_base 19: mod_base = OTHER; note = 2'-O,4'-C-methylene adenosine-3'-phosphate
  modified_base 20: mod_base = OTHER; note = 2'-deoxyadenosine-3'-phosphate ((2S,4R)-1-[29-[[2-(acetylamino)-2-deoxy-beta-D-galactopyra nosyl]oxy]-14,14-bis[[3-[[3-[[5-[[2-(acetylamino)-2-deoxy-b eta-D-galactopyranosyl]oxy]-1-oxopentyl]amino]propyl]amino] -3-oxopropoxy]methyl]-1,12,19,25-tetraoxo-16-oxa-13,20,24-t riazanonacos-1-yl]-4-hydroxy-2-pyrrolidinyl)methyl ester
  misc_feature 1..19: note = RNA
  misc_feature 20: note = DNA
gttaacaccatttacttcaa

SEQ ID NO: 14 - DNA, 16 bp, synthetic construct
  source 1..16: mol_type = other DNA
  modified_base 1: mod_base = OTHER; note = 2'-O,4'-C-methylene adenosine-3'-phosphorothioate
  modified_base 2: mod_base = OTHER; note = 2'-O-methylcytidine-3'-phosphorothioate
  modified_base 3: mod_base = OTHER; note = 2'-O-methyladenosine-3'-phosphorothioate
  modified_base 4: mod_base = OTHER; note = 2'-O-methylcytidine-3'-phosphorothioate
  modified_base 5: mod_base = OTHER; note = 2'-O-methylcytidine-3'-phosphorothioate
  modified_base 6: mod_base = OTHER; note = 2'-O-methyladenosine-3'-phosphorothioate
  modified_base 7: mod_base = OTHER; note = 2'-O-methyluridine-3'-phosphorothioate
  modified_base 8: mod_base = OTHER; note = 2'-O-methyluridine-3'-phosphorothioate
  modified_base 9: mod_base = OTHER; note = 2'-O-methyluridine-3'-phosphorothioate
  modified_base 10: mod_base = OTHER; note = 2'-O-methyladenosine-3'-phosphorothioate
  modified_base 11: mod_base = OTHER; note = 2'-O-methylcytidine-3'-phosphorothioate
  modified_base 12: mod_base = OTHER; note = 2'-O-methyluridine-3'-phosphorothioate
  modified_base 13: mod_base = OTHER; note = 2'-O-methyluridine-3'-phosphorothioate
  modified_base 14: mod_base = OTHER; note = 2'-O-methylcytidine-3'-phosphorothioate
  modified_base 15: mod_base = OTHER; note = 2'-O,4'-C-methylene adenosine-3'-phosphate
  modified_base 16: mod_base = OTHER; note = 2'-deoxyadenosine-3'-phosphate ((2S,4R)-1-[29-[[2-(acetylamino)-2-deoxy-beta-D-galactopyra nosyl]oxy]-14,14-bis[[3-[[3-[[5-[[2-(acetylamino)-2-deoxy-b eta-D-galactopyranosyl]oxy]-1-oxopentyl]amino]propyl]amino] -3-oxopropoxy]methyl]-1,12,19,25-tetraoxo-16-oxa-13,20,24-t riazanonacos-1-yl]-4-hydroxy-2-pyrrolidinyl)methyl ester
  misc_feature 1..15: note = RNA
  misc_feature 16: note = DNA
acaccatttacttcaa

SEQ ID NO: 15 - DNA, 16 bp, synthetic construct
  source 1..16: mol_type = other DNA
  modified_base 1: mod_base = OTHER; note = 2'-O,4'-C-methylene adenosine-3'-phosphorothioate
  modified_base 2: mod_base = OTHER; note = 2'-O,4'-C-methylene 5-methylcytidine-3'-phosphorothioate
  modified_base 3: mod_base = OTHER; note = 2'-O-methyladenosine-3'-phosphorothioate
  modified_base 4: mod_base = OTHER; note = 2'-O-methylcytidine-3'-phosphorothioate
  modified_base 5: mod_base = OTHER; note = 2'-O-methylcytidine-3'-phosphorothioate
  modified_base 6: mod_base = OTHER; note = 2'-O-methyladenosine-3'-phosphorothioate
  modified_base 7: mod_base = OTHER; note = 2'-O-methyluridine-3'-phosphorothioate
  modified_base 8: mod_base = OTHER; note = 2'-O-methyluridine-3'-phosphorothioate
  modified_base 9: mod_base = OTHER; note = 2'-O-methyluridine-3'-phosphorothioate
  modified_base 10: mod_base = OTHER; note = 2'-O-methyladenosine-3'-phosphorothioate
  modified_base 11: mod_base = OTHER; note = 2'-O-methylcytidine-3'-phosphorothioate
  modified_base 12: mod_base = OTHER; note = 2'-O-methyluridine-3'-phosphorothioate
  modified_base 13: mod_base = OTHER; note = 2'-O,4'-C-methylene 5-methyluridine-3'-phosphorothioate
  modified_base 14: mod_base = OTHER; note = 2'-O-methylcytidine-3'-phosphorothioate
  modified_base 15: mod_base = OTHER; note = 2'-O,4'-C-methylene adenosine-3'-phosphate
  modified_base 16: mod_base = OTHER; note = 2'-deoxyadenosine-3'-phosphate ((2S,4R)-1-[29-[[2-(acetylamino)-2-deoxy-beta-D-galactopyra nosyl]oxy]-14,14-bis[[3-[[3-[[5-[[2-(acetylamino)-2-deoxy-b eta-D-galactopyranosyl]oxy]-1-oxopentyl]amino]propyl]amino] -3-oxopropoxy]methyl]-1,12,19,25-tetraoxo-16-oxa-13,20,24-t riazanonacos-1-yl]-4-hydroxy-2-pyrrolidinyl)methyl ester
  misc_feature 1..15: note = RNA
  misc_feature 16: note = DNA
acaccatttacttcaa

SEQ ID NO: 16 - DNA, 16 bp, synthetic construct
  source 1..16: mol_type = other DNA
  modified_base 1: mod_base = OTHER; note = 2'-O,4'-C-methylene adenosine-3'-phosphorothioate
  modified_base 2: mod_base = OTHER; note = 2'-O-methylcytidine-3'-phosphorothioate
  modified_base 3: mod_base = OTHER; note = 2'-O,4'-C-methylene adenosine-3'-phosphorothioate
  modified_base 4: mod_base = OTHER; note = 2'-O-methylcytidine-3'-phosphorothioate
  modified_base 5: mod_base = OTHER; note = 2'-O-methylcytidine-3'-phosphorothioate
  modified_base 6: mod_base = OTHER; note = 2'-O-methyladenosine-3'-phosphorothioate
  modified_base 7: mod_base = OTHER; note = 2'-O-methyluridine-3'-phosphorothioate
  modified_base 8: mod_base = OTHER; note = 2'-O-methyluridine-3'-phosphorothioate
  modified_base 9: mod_base = OTHER; note = 2'-O-methyluridine-3'-phosphorothioate
  modified_base 10: mod_base = OTHER; note = 2'-O-methyladenosine-3'-phosphorothioate
  modified_base 11: mod_base = OTHER; note = 2'-O,4'-C-methylene 5-methylcytidine-3'-phosphorothioate
  modified_base 12: mod_base = OTHER; note = 2'-O-methyluridine-3'-phosphorothioate
  modified_base 13: mod_base = OTHER; note = 2'-O,4'-C-methylene 5-methyluridine-3'-phosphorothioate
  modified_base 14: mod_base = OTHER; note = 2'-O-methylcytidine-3'-phosphorothioate
  modified_base 15: mod_base = OTHER; note = 2'-O,4'-C-methylene adenosine-3'-phosphate
  modified_base 16: mod_base = OTHER; note = 2'-deoxyadenosine-3'-phosphate ((2S,4R)-1-[29-[[2-(acetylamino)-2-deoxy-beta-D-galactopyra nosyl]oxy]-14,14-bis[[3-[[3-[[5-[[2-(acetylamino)-2-deoxy-b eta-D-galactopyranosyl]oxy]-1-oxopentyl]amino]propyl]amino] -3-oxopropoxy]methyl]-1,12,19,25-tetraoxo-16-oxa-13,20,24-t riazanonacos-1-yl]-4-hydroxy-2-pyrrolidinyl)methyl ester
  misc_feature 1..15: note = RNA
  misc_feature 16: note = DNA
acaccatttacttcaa

SEQ ID NO: 17 - DNA, 23 bp, synthetic construct
  source 1..23: mol_type = other DNA
  modified_base 1: mod_base = OTHER; note = 2'-O-methylcytidine-3'-phosphorothioate
  modified_base 2: mod_base = OTHER; note = 2'-O,4'-C-methylene 5-methyluridine-3'-phosphorothioate
  modified_base 3: mod_base = OTHER; note = 2'-deoxyguanosine-3'-phosphorothioate
  modified_base 4: mod_base = OTHER; note = 2'-O,4'-C-methylene guanosine-3'-phosphorothioate
  modified_base 5: mod_base = OTHER; note = 2'-O-methyluridine-3'-phosphorothioate
  modified_base 6: mod_base = OTHER; note = 2'-O-methyluridine-3'-phosphorothioate
  modified_base 7: mod_base = OTHER; note = 2'-O-methyladenosine-3'-phosphorothioate
  modified_base 8: mod_base = OTHER; note = 2'-O-methyladenosine-3'-phosphorothioate
  modified_base 9: mod_base = OTHER; note = 2'-O-methylcytidine-3'-phosphorothioate
  modified_base 10: mod_base = OTHER; note = 2'-O,4'-C-methylene adenosine-3'-phosphorothioate
  modified_base 11: mod_base = OTHER; note = 2'-deoxycytidine-3'-phosphorothioate
  modified_base 12: mod_base = OTHER; note = 2'-O-methylcytidine-3'-phosphorothioate
  modified_base 13: mod_base = OTHER; note = 2'-O-methyladenosine-3'-phosphorothioate
  modified_base 14: mod_base = OTHER; note = 2'-O-methyluridine-3'-phosphorothioate
  modified_base 15: mod_base = OTHER; note = 2'-O-methyluridine-3'-phosphorothioate
  modified_base 16: mod_base = OTHER; note = 2'-O-methyluridine-3'-phosphorothioate
  modified_base 17: mod_base = OTHER; note = 2'-O-methyladenosine-3'-phosphorothioate
  modified_base 18: mod_base = OTHER; note = 2'-O,4'-C-methylene 5-methylcytidine-3'-phosphorothioate
  modified_base 19: mod_base = OTHER; note = 2'-deoxythymidine-3'-phosphorothioate
  modified_base 20: mod_base = OTHER; note = 2'-O,4'-C-methylene 5-methyluridine-3'-phosphorothioate
  modified_base 21: mod_base = OTHER; note = 2'-deoxycytidine-3'-phosphorothioate
  modified_base 22: mod_base = OTHER; note = 2'-O,4'-C-methylene adenosine-3'-phosphate
  modified_base 23: mod_base = OTHER; note = 2'-deoxyadenosine-3'-phosphate ((2S,4R)-1-[29-[[2-(acetylamino)-2-deoxy-beta-D-galactopyra nosyl]oxy]-14,14-bis[[3-[[3-[[5-[[2-(acetylamino)-2-deoxy-b eta-D-galactopyranosyl]oxy]-1-oxopentyl]amino]propyl]amino] -3-oxopropoxy]methyl]-1,12,19,25-tetraoxo-16-oxa-13,20,24-t riazanonacos-1-yl]-4-hydroxy-2-pyrrolidinyl)methyl ester
  misc_feature 1..2: note = RNA
  misc_feature 4..10: note = RNA
  misc_feature 12..18: note = RNA
  misc_feature 20: note = RNA
  misc_feature 22: note = RNA
  misc_feature 3: note = DNA
  misc_feature 11: note = DNA
  misc_feature 19: note = DNA
  misc_feature 21: note = DNA
  misc_feature 23: note = DNA
ctggttaacaccatttacttcaa

SEQ ID NO: 18 - DNA, 20 bp, synthetic construct
  source 1..20: mol_type = other DNA
  modified_base 1: mod_base = OTHER; note = 2'-O,4'-C-methylene guanosine-3'-phosphorothioate
  modified_base 2: mod_base = OTHER; note = 2'-O-methyluridine-3'-phosphorothioate
  modified_base 3: mod_base = OTHER; note = 2'-O-methyluridine-3'-phosphorothioate
  modified_base 4: mod_base = OTHER; note = 2'-O-methyladenosine-3'-phosphorothioate
  modified_base 5: mod_base = OTHER; note = 2'-O-methyladenosine-3'-phosphorothioate
  modified_base 6: mod_base = OTHER; note = 2'-O-methylcytidine-3'-phosphorothioate
  modified_base 7: mod_base = OTHER; note = 2'-O,4'-C-methylene adenosine-3'-phosphorothioate
  modified_base 8: mod_base = OTHER; note = 2'-deoxycytidine-3'-phosphorothioate
  modified_base 9: mod_base = OTHER; note = 2'-O-methylcytidine-3'-phosphorothioate
  modified_base 10: mod_base = OTHER; note = 2'-O-methyladenosine-3'-phosphorothioate
  modified_base 11: mod_base = OTHER; note = 2'-O-methyluridine-3'-phosphorothioate
  modified_base 12: mod_base = OTHER; note = 2'-O-methyluridine-3'-phosphorothioate
  modified_base 13: mod_base = OTHER; note = 2'-O-methyluridine-3'-phosphorothioate
  modified_base 14: mod_base = OTHER; note = 2'-O-methyladenosine-3'-phosphorothioate
  modified_base 15: mod_base = OTHER; note = 2'-O,4'-C-methylene 5-methylcytidine-3'-phosphorothioate
  modified_base 16: mod_base = OTHER; note = 2'-deoxythymidine-3'-phosphorothioate
  modified_base 17: mod_base = OTHER; note = 2'-O,4'-C-methylene 5-methyluridine-3'-phosphorothioate
  modified_base 18: mod_base = OTHER; note = 2'-deoxycytidine-3'-phosphorothioate
  modified_base 19: mod_base = OTHER; note = 2'-O,4'-C-methylene adenosine-3'-phosphate
  modified_base 20: mod_base = OTHER; note = 2'-deoxyadenosine-3'-phosphate ((2S,4R)-1-[29-[[2-(acetylamino)-2-deoxy-beta-D-galactopyra nosyl]oxy]-14,14-bis[[3-[[3-[[5-[[2-(acetylamino)-2-deoxy-b eta-D-galactopyranosyl]oxy]-1-oxopentyl]amino]propyl]amino] -3-oxopropoxy]methyl]-1,12,19,25-tetraoxo-16-oxa-13,20,24-t riazanonacos-1-yl]-4-hydroxy-2-pyrrolidinyl)methyl ester
  misc_feature 1..7: note = RNA
  misc_feature 9..15: note = RNA
  misc_feature 17: note = RNA
  misc_feature 19: note = RNA
  misc_feature 8: note = DNA
  misc_feature 16: note = DNA
  misc_feature 18: note = DNA
  misc_feature 20: note = DNA
gttaacaccatttacttcaa

SEQ ID NO: 19 - DNA, 16 bp, synthetic construct
  source 1..16: mol_type = other DNA
  modified_base 1: mod_base = OTHER; note = 2'-O,4'-C-methylene adenosine-3'-phosphorothioate
  modified_base 2: mod_base = OTHER; note = 2'-O-methylcytidine-3'-phosphorothioate
  modified_base 3: mod_base = OTHER; note = 2'-O,4'-C-methylene adenosine-3'-phosphorothioate
  modified_base 4: mod_base = OTHER; note = 2'-deoxycytidine-3'-phosphorothioate
  modified_base 5: mod_base = OTHER; note = 2'-O-methylcytidine-3'-phosphorothioate
  modified_base 6: mod_base = OTHER; note = 2'-O-methyladenosine-3'-phosphorothioate
  modified_base 7: mod_base = OTHER; note = 2'-O-methyluridine-3'-phosphorothioate
  modified_base 8: mod_base = OTHER; note = 2'-O-methyluridine-3'-phosphorothioate
  modified_base 9: mod_base = OTHER; note = 2'-O-methyluridine-3'-phosphorothioate
  modified_base 10: mod_base = OTHER; note = 2'-O-methyladenosine-3'-phosphorothioate
  modified_base 11: mod_base = OTHER; note = 2'-O,4'-C-methylene 5-methylcytidine-3'-phosphorothioate
  modified_base 12: mod_base = OTHER; note = 2'-deoxythymidine-3'-phosphorothioate
  modified_base 13: mod_base = OTHER; note = 2'-O,4'-C-methylene 5-methyluridine-3'-phosphorothioate
  modified_base 14: mod_base = OTHER; note = 2'-deoxycytidine-3'-phosphorothioate
  modified_base 15: mod_base = OTHER; note = 2'-O,4'-C-methylene adenosine-3'-phosphate
  modified_base 16: mod_base = OTHER; note = 2'-deoxyadenosine-3'-phosphate ((2S,4R)-1-[29-[[2-(acetylamino)-2-deoxy-beta-D-galactopyra nosyl]oxy]-14,14-bis[[3-[[3-[[5-[[2-(acetylamino)-2-deoxy-b eta-D-galactopyranosyl]oxy]-1-oxopentyl]amino]propyl]amino] -3-oxopropoxy]methyl]-1,12,19,25-tetraoxo-16-oxa-13,20,24-t riazanonacos-1-yl]-4-hydroxy-2-pyrrolidinyl)methyl ester
  misc_feature 1..3: note = RNA
  misc_feature 5..11: note = RNA
  misc_feature 13: note = RNA
  misc_feature 15: note = RNA
  misc_feature 4: note = DNA
  misc_feature 12: note = DNA
  misc_feature 14: note = DNA
  misc_feature 16: note = DNA
acaccatttacttcaa

SEQ ID NO: 20 - DNA, 20 bp, synthetic construct
  source 1..20: mol_type = other DNA
  modified_base 1: mod_base = OTHER; note = 2'-O,4'-C-methylene guanosine-3'-phosphorothioate
  modified_base 2: mod_base = OTHER; note = 2'-O-methyluridine-3'-phosphorothioate
  modified_base 3: mod_base = OTHER; note = 2'-O-methyluridine-3'-phosphorothioate
  modified_base 4: mod_base = OTHER; note = 2'-O-methyladenosine-3'-phosphorothioate
  modified_base 5: mod_base = OTHER; note = 2'-O-methyladenosine-3'-phosphorothioate
  modified_base 6: mod_base = OTHER; note = 2'-O-methylcytidine-3'-phosphorothioate
  modified_base 7: mod_base = OTHER; note = 2'-O,4'-C-methylene adenosine-3'-phosphorothioate
  modified_base 8: mod_base = OTHER; note = 2'-O-methylcytidine-3'-phosphorothioate
  modified_base 9: mod_base = OTHER; note = 2'-O-methylguanosine-3'-phosphorothioate
  modified_base 10: mod_base = OTHER; note = 2'-O-methyluridine-3'-phosphorothioate
  modified_base 11: mod_base = OTHER; note = 2'-O-methyluridine-3'-phosphorothioate
  modified_base 12: mod_base = OTHER; note = 2'-O-methyluridine-3'-phosphorothioate
  modified_base 13: mod_base = OTHER; note = 2'-O-methyluridine-3'-phosphorothioate
  modified_base 14: mod_base = OTHER; note = 2'-O-methyladenosine-3'-phosphorothioate
  modified_base 15: mod_base = OTHER; note = 2'-O,4'-C-methylene guanosine-3'-phosphorothioate
  modified_base 16: mod_base = OTHER; note = 2'-O-methyladenosine-3'-phosphorothioate
  modified_base 17: mod_base = OTHER; note = 2'-O,4'-C-methylene 5-methyluridine-3'-phosphorothioate
  modified_base 18: mod_base = OTHER; note = 2'-O-methylcytidine-3'-phosphorothioate
  modified_base 19: mod_base = OTHER; note = 2'-O,4'-C-methylene adenosine-3'-phosphate
  modified_base 20: mod_base = OTHER; note = 2'-deoxyadenosine-3'-phosphate ((2S,4R)-1-[29-[[2-(acetylamino)-2-deoxy-beta-D-galactopyra nosyl]oxy]-14,14-bis[[3-[[3-[[5-[[2-(acetylamino)-2-deoxy-b eta-D-galactopyranosyl]oxy]-1-oxopentyl]amino]propyl]amino] -3-oxopropoxy]methyl]-1,12,19,25-tetraoxo-16-oxa-13,20,24-t riazanonacos-1-yl]-4-hydroxy-2-pyrrolidinyl)methyl ester
  misc_feature 1..19: note = RNA
  misc_feature 20: note = DNA
gttaacacgttttagatcaa

SEQ ID NO: 21 - DNA, 20 bp, synthetic construct
  source 1..20: mol_type = other DNA
  modified_base 1: mod_base = OTHER; note = 2'-O,4'-C-methylene adenosine-3'-phosphorothioate
  modified_base 2: mod_base = OTHER; note = 2'-O-methylcytidine-3'-phosphorothioate
  modified_base 3: mod_base = OTHER; note = 2'-O-methylcytidine-3'-phosphorothioate
  modified_base 4: mod_base = OTHER; note = 2'-O-methyluridine-3'-phosphorothioate
  modified_base 5: mod_base = OTHER; note = 2'-O-methyluridine-3'-phosphorothioate
  modified_base 6: mod_base = OTHER; note = 2'-O-methyladenosine-3'-phosphorothioate
  modified_base 7: mod_base = OTHER; note = 2'-O,4'-C-methylene 5-methyluridine-3'-phosphorothioate
  modified_base 8: mod_base = OTHER; note = 2'-O-methyladenosine-3'-phosphorothioate
  modified_base 9: mod_base = OTHER; note = 2'-O-methyluridine-3'-phosphorothioate
  modified_base 10: mod_base = OTHER; note = 2'-O-methyladenosine-3'-phosphorothioate
  modified_base 11: mod_base = OTHER; note = 2'-O-methylcytidine-3'-phosphorothioate
  modified_base 12: mod_base = OTHER; note = 2'-O-methylguanosine-3'-phosphorothioate
  modified_base 13: mod_base = OTHER; note = 2'-O-methyladenosine-3'-phosphorothioate
  modified_base 14: mod_base = OTHER; note = 2'-O-methyluridine-3'-phosphorothioate
  modified_base 15: mod_base = OTHER; note = 2'-O,4'-C-methylene 5-methyluridine-3'-phosphorothioate
  modified_base 16: mod_base = OTHER; note = 2'-O-methyladenosine-3'-phosphorothioate
  modified_base 17: mod_base = OTHER; note = 2'-O,4'-C-methylene 5-methylcytidine-3'-phosphorothioate
  modified_base 18: mod_base = OTHER; note = 2'-O-methyluridine-3'-phosphorothioate
  modified_base 19: mod_base = OTHER; note = 2'-O,4'-C-methylene 5-methylcytidine-3'-phosphate
  modified_base 20: mod_base = OTHER; note = 2'-deoxyadenosine-3'-phosphate ((2S,4R)-1-[29-[[2-(acetylamino)-2-deoxy-beta-D-galactopyra nosyl]oxy]-14,14-bis[[3-[[3-[[5-[[2-(acetylamino)-2-deoxy-b eta-D-galactopyranosyl]oxy]-1-oxopentyl]amino]propyl]amino] -3-oxopropoxy]methyl]-1,12,19,25-tetraoxo-16-oxa-13,20,24-t riazanonacos-1-yl]-4-hydroxy-2-pyrrolidinyl)methyl ester
  misc_feature 1..19: note = RNA
  misc_feature 20: note = DNA
accttatatacgattactca

SEQ ID NO: 22 - DNA, 20 bp, synthetic construct
  source 1..20: mol_type = other DNA
  modified_base 1: mod_base = OTHER; note = 2'-O-methylguanosine-3'-phosphorothioate
  modified_base 2: mod_base = OTHER; note = 2'-O,4'-C-methylmethylene 5-methyluridine-3'-phosphorothioate
  modified_base 3: mod_base = OTHER; note = 2'-O-methyluridine-3'-phosphorothioate
  modified_base 4: mod_base = OTHER; note = 2'-O-methyladenosine-3'-phosphorothioate
  modified_base 5: mod_base = OTHER; note = 2'-O-methyladenosine-3'-phosphorothioate
  modified_base 6: mod_base = OTHER; note = 2'-O-methylcytidine-3'-phosphorothioate
  modified_base 7: mod_base = OTHER; note = 2'-O-methyladenosine-3'-phosphorothioate
  modified_base 8: mod_base = OTHER; note = 2'-O,4'-C-methylmethylene 5-methylcytidine-3'-phosphorothioate
  modified_base 9: mod_base = OTHER; note = 2'-O-methylcytidine-3'-phosphorothioate
  modified_base 10: mod_base = OTHER; note = 2'-O-methyladenosine-3'-phosphorothioate
  modified_base 11: mod_base = OTHER; note = 2'-O-methyluridine-3'-phosphorothioate
  modified_base 12: mod_base = OTHER; note = 2'-O-methyluridine-3'-phosphorothioate
  modified_base 13: mod_base = OTHER; note = 2'-O-methyluridine-3'-phosphorothioate
  modified_base 14: mod_base = OTHER; note = 2'-O-methyladenosine-3'-phosphorothioate
  modified_base 15: mod_base = OTHER; note = 2'-O,4'-C-methylmethylene 5-methylcytidine-3'-phosphorothioate
  modified_base 16: mod_base = OTHER; note = 2'-O-methyluridine-3'-phosphorothioate
  modified_base 17: mod_base = OTHER; note = 2'-O,4'-C-methylmethylene 5-methyluridine-3'-phosphorothioate
  modified_base 18: mod_base = OTHER; note = 2'-O,4'-C-methylmethylene 5-methylcytidine-3'-phosphorothioate
  modified_base 19: mod_base = OTHER; note = 2'-O-methyladenosine-3'-phosphate
  modified_base 20: mod_base = OTHER; note = 2'-deoxyadenosine-3'-phosphate ((2S,4R)-1-[29-[[2-(acetylamino)-2-deoxy-beta-D-galactopyra nosyl]oxy]-14,14-bis[[3-[[3-[[5-[[2-(acetylamino)-2-deoxy-b eta-D-galactopyranosyl]oxy]-1-oxopentyl]amino]propyl]amino] -3-oxopropoxy]methyl]-1,12,19,25-tetraoxo-16-oxa-13,20,24-t riazanonacos-1-yl]-4-hydroxy-2-pyrrolidinyl)methyl ester
  misc_feature 1..19: note = RNA
  misc_feature 20: note = DNA
gttaacaccatttacttcaa

SEQ ID NO: 23 - DNA, 20 bp, synthetic construct
  source 1..20: mol_type = other DNA
  modified_base 1: mod_base = OTHER; note = 2'-O-methylguanosine-3'-phosphorothioate
  modified_base 2: mod_base = OTHER; note = 2'-O,4'-C-methylene 5-methyluridine-3'-phosphorothioate
  modified_base 3: mod_base = OTHER; note = 2'-O-methyluridine-3'-phosphorothioate
  modified_base 4: mod_base = OTHER; note = 2'-O-methyladenosine-3'-phosphorothioate
  modified_base 5: mod_base = OTHER; note = 2'-O-methyladenosine-3'-phosphorothioate
  modified_base 6: mod_base = OTHER; note = 2'-O-methylcytidine-3'-phosphorothioate
  modified_base 7: mod_base = OTHER; note = 2'-O-methyladenosine-3'-phosphorothioate
  modified_base 8: mod_base = OTHER; note = 2'-O,4'-C-methylene 5-methylcytidine-3'-phosphorothioate
  modified_base 9: mod_base = OTHER; note = 2'-O-methylcytidine-3'-phosphorothioate
  modified_base 10: mod_base = OTHER; note = 2'-O-methyladenosine-3'-phosphorothioate
  modified_base 11: mod_base = OTHER; note = 2'-O-methyluridine-3'-phosphorothioate
  modified_base 12: mod_base = OTHER; note = 2'-O-methyluridine-3'-phosphorothioate
  modified_base 13: mod_base = OTHER; note = 2'-O-methyluridine-3'-phosphorothioate
  modified_base 14: mod_base = OTHER; note = 2'-O-methyladenosine-3'-phosphorothioate
  modified_base 15: mod_base = OTHER; note = 2'-O,4'-C-methylene 5-methylcytidine-3'-phosphorothioate
  modified_base 16: mod_base = OTHER; note = 2'-O-methyluridine-3'-phosphorothioate
  modified_base 17: mod_base = OTHER; note = 2'-O,4'-C-methylene 5-methyluridine-3'-phosphorothioate
  modified_base 18: mod_base = OTHER; note = 2'-O,4'-C-methylene 5-methylcytidine-3'-phosphorothioate
  modified_base 19: mod_base = OTHER; note = 2'-O-methyladenosine-3'-phosphate
  modified_base 20: mod_base = OTHER; note = 2'-deoxyadenosine-3'-phosphate ((2S,4R)-1-[29-[[2-(acetylamino)-2-deoxy-beta-D-galactopyra nosyl]oxy]-14,14-bis[[3-[[3-[[5-[[2-(acetylamino)-2-deoxy-b eta-D-galactopyranosyl]oxy]-1-oxopentyl]amino]propyl]amino] -3-oxopropoxy]methyl]-1,12,19,25-tetraoxo-16-oxa-13,20,24-t riazanonacos-1-yl]-4-hydroxy-2-pyrrolidinyl)methyl ester
  misc_feature 1..19: note = RNA
  misc_feature 20: note = DNA
gttaacaccatttacttcaa

SEQ ID NO: 24 - DNA, 20 bp, synthetic construct
  source 1..20: mol_type = other DNA
  modified_base 1: mod_base = OTHER; note = 2'-O-methylguanosine-3'-phosphorothioate
  modified_base 2: mod_base = OTHER; note = 2'-O,4'-C-methylmethylene 5-methyluridine-3'-phosphorothioate
  modified_base 3: mod_base = OTHER; note = 2'-O-methyluridine-3'-phosphorothioate
  modified_base 4: mod_base = OTHER; note = 2'-O-methyladenosine-3'-phosphorothioate
  modified_base 5: mod_base = OTHER; note = 2'-O-methyladenosine-3'-phosphorothioate
  modified_base 6: mod_base = OTHER; note = 2'-O-methylcytidine-3'-phosphorothioate
  modified_base 7: mod_base = OTHER; note = 2'-O-methyladenosine-3'-phosphorothioate
  modified_base 8: mod_base = OTHER; note = 2'-O,4'-C-methylmethylene 5-methylcytidine-3'-phosphorothioate
  modified_base 9: mod_base = OTHER; note = 2'-O-methylcytidine-3'-phosphorothioate
  modified_base 10: mod_base = OTHER; note = 2'-O-methyladenosine-3'-phosphate
  modified_base 11: mod_base = OTHER; note = 2'-O-methyluridine-3'-phosphorothioate
  modified_base 12: mod_base = OTHER; note = 2'-O-methyluridine-3'-phosphorothioate
  modified_base 13: mod_base = OTHER; note = 2'-O-methyluridine-3'-phosphorothioate
  modified_base 14: mod_base = OTHER; note = 2'-O-methyladenosine-3'-phosphorothioate
  modified_base 15: mod_base = OTHER; note = 2'-O,4'-C-methylmethylene 5-methylcytidine-3'-phosphorothioate
  modified_base 16: mod_base = OTHER; note = 2'-O-methyluridine-3'-phosphorothioate
  modified_base 17: mod_base = OTHER; note = 2'-O,4'-C-methylmethylene 5-methyluridine-3'-phosphorothioate
  modified_base 18: mod_base = OTHER; note = 2'-O,4'-C-methylmethylene 5-methylcytidine-3'-phosphorothioate
  modified_base 19: mod_base = OTHER; note = 2'-O-methyladenosine-3'-phosphate
  modified_base 20: mod_base = OTHER; note = 2'-deoxyadenosine-3'-phosphate ((2S,4R)-1-[29-[[2-(acetylamino)-2-deoxy-beta-D-galactopyra nosyl]oxy]-14,14-bis[[3-[[3-[[5-[[2-(acetylamino)-2-deoxy-b eta-D-galactopyranosyl]oxy]-1-oxopentyl]amino]propyl]amino] -3-oxopropoxy]methyl]-1,12,19,25-tetraoxo-16-oxa-13,20,24-t riazanonacos-1-yl]-4-hydroxy-2-pyrrolidinyl)methyl ester
  misc_feature 1..19: note = RNA
  misc_feature 20: note = DNA
gttaacaccatttacttcaa

SEQ ID NO: 25 - DNA, 20 bp, synthetic construct
  source 1..20: mol_type = other DNA
  modified_base 1: mod_base = OTHER; note = 2'-O-methylguanosine-3'-phosphorothioate
  modified_base 2: mod_base = OTHER; note = 2'-O,4'-C-methylmethylene 5-methyluridine-3'-phosphorothioate
  modified_base 3: mod_base = OTHER; note = 2'-O-methyluridine-3'-phosphorothioate
  modified_base 4: mod_base = OTHER; note = 2'-O-methyladenosine-3'-phosphorothioate
  modified_base 5: mod_base = OTHER; note = 2'-O-methyladenosine-3'-phosphorothioate
  modified_base 6: mod_base = OTHER; note = 2'-O-methylcytidine-3'-phosphorothioate
  modified_base 7: mod_base = OTHER; note = 2'-O-methyladenosine-3'-phosphorothioate
  modified_base 8: mod_base = OTHER; note = 2'-O,4'-C-methylmethylene 5-methylcytidine-3'-phosphorothioate
  modified_base 9: mod_base = OTHER; note = 2'-O-methylcytidine-3'-phosphorothioate
  modified_base 11: mod_base = OTHER; note = 2'-O-methyluridine-3'-phosphorothioate
  modified_base 12: mod_base = OTHER; note = 2'-O-methyluridine-3'-phosphorothioate
  modified_base 13: mod_base = OTHER; note = 2'-O-methyluridine-3'-phosphorothioate
  modified_base 14: mod_base = OTHER; note = 2'-O-methyladenosine-3'-phosphorothioate
  modified_base 15: mod_base = OTHER; note = 2'-O,4'-C-methylmethylene 5-methylcytidine-3'-phosphorothioate
  modified_base 16: mod_base = OTHER; note = 2'-O-methyluridine-3'-phosphorothioate
  modified_base 17: mod_base = OTHER; note = 2'-O,4'-C-methylmethylene 5-methyluridine-3'-phosphorothioate
  modified_base 18: mod_base = OTHER; note = 2'-O,4'-C-methylmethylene 5-methylcytidine-3'-phosphorothioate
  modified_base 19: mod_base = OTHER; note = 2'-O-methyladenosine-3'-phosphate
  modified_base 20: mod_base = OTHER; note = 2'-deoxyadenosine-3'-phosphate ((2S,4R)-1-[29-[[2-(acetylamino)-2-deoxy-beta-D-galactopyra nosyl]oxy]-14,14-bis[[3-[[3-[[5-[[2-(acetylamino)-2-deoxy-b eta-D-galactopyranosyl]oxy]-1-oxopentyl]amino]propyl]amino] -3-oxopropoxy]methyl]-1,12,19,25-tetraoxo-16-oxa-13,20,24-t riazanonacos-1-yl]-4-hydroxy-2-pyrrolidinyl)methyl ester
  misc_feature 1..9: note = RNA
  misc_feature 11..19: note = RNA
  misc_feature 10: note = DNA
  misc_feature 20: note = DNA
gttaacaccatttacttcaa

SEQ ID NO: 26 - DNA, 20 bp, synthetic construct
  source 1..20: mol_type = other DNA
  modified_base 1: mod_base = OTHER; note = 2'-O-methylguanosine-3'-phosphorothioate
  modified_base 2: mod_base = OTHER; note = 2'-O-methyluridine-3'-phosphorothioate
  modified_base 3: mod_base = OTHER; note = 2'-O-methyluridine-3'-phosphorothioate
  modified_base 4: mod_base = OTHER; note = 2'-O-methyladenosine-3'-phosphorothioate
  modified_base 5: mod_base = OTHER; note = 2'-O-methyladenosine-3'-phosphorothioate
  modified_base 6: mod_base = OTHER; note = 2'-O-methylcytidine-3'-phosphorothioate
  modified_base 7: mod_base = OTHER; note = 2'-O-methyladenosine-3'-phosphorothioate
  modified_base 8: mod_base = OTHER; note = 2'-O-methylcytidine-3'-phosphorothioate
  modified_base 9: mod_base = OTHER; note = 2'-O-methylcytidine-3'-phosphorothioate
  modified_base 10: mod_base = OTHER; note = 2'-O-methyladenosine-3'-phosphorothioate
  modified_base 11: mod_base = OTHER; note = 2'-O,4'-C-methylmethylene 5-methyluridine-3'-phosphorothioate
  modified_base 12: mod_base = OTHER; note = 2'-O-methyluridine-3'-phosphorothioate
  modified_base 13: mod_base = OTHER; note = 2'-O,4'-C-methylmethylene 5-methyluridine-3'-phosphorothioate
  modified_base 14: mod_base = OTHER; note = 2'-O-methyladenosine-3'-phosphorothioate
  modified_base 15: mod_base = OTHER; note = 2'-O,4'-C-methylmethylene 5-methylcytidine-3'-phosphorothioate
  modified_base 16: mod_base = OTHER; note = 2'-O-methyluridine-3'-phosphorothioate
  modified_base 17: mod_base = OTHER; note = 2'-O,4'-C-methylmethylene 5-methyluridine-3'-phosphorothioate
  modified_base 18: mod_base = OTHER; note = 2'-O,4'-C-methylmethylene 5-methylcytidine-3'-phosphorothioate
  modified_base 19: mod_base = OTHER; note = 2'-O-methyladenosine-3'-phosphate
  modified_base 20: mod_base = OTHER; note = 2'-deoxyadenosine-3'-phosphate ((2S,4R)-1-[29-[[2-(acetylamino)-2-deoxy-beta-D-galactopyra nosyl]oxy]-14,14-bis[[3-[[3-[[5-[[2-(acetylamino)-2-deoxy-b eta-D-galactopyranosyl]oxy]-1-oxopentyl]amino]propyl]amino] -3-oxopropoxy]methyl]-1,12,19,25-tetraoxo-16-oxa-13,20,24-t riazanonacos-1-yl]-4-hydroxy-2-pyrrolidinyl)methyl ester
  misc_feature 1..19: note = RNA
  misc_feature 20: note = DNA
gttaacaccatttacttcaa

SEQ ID NO: 27 - DNA, 20 bp, synthetic construct
  source 1..20: mol_type = other DNA
  modified_base 1: mod_base = OTHER; note = 2'-O-methylguanosine-3'-phosphorothioate
  modified_base 2: mod_base = OTHER; note = 2'-O-methyluridine-3'-phosphorothioate
  modified_base 3: mod_base = OTHER; note = 2'-O-methyluridine-3'-phosphorothioate
  modified_base 4: mod_base = OTHER; note = 2'-O-methyladenosine-3'-phosphorothioate
  modified_base 5: mod_base = OTHER; note = 2'-O-methyladenosine-3'-phosphorothioate
  modified_base 6: mod_base = OTHER; note = 2'-O-methylcytidine-3'-phosphorothioate
  modified_base 7: mod_base = OTHER; note = 2'-O-methyladenosine-3'-phosphorothioate
  modified_base 8: mod_base = OTHER; note = 2'-O-methylcytidine-3'-phosphorothioate
  modified_base 9: mod_base = OTHER; note = 2'-O-methylcytidine-3'-phosphorothioate
  modified_base 10: mod_base = OTHER; note = 2'-O-methyladenosine-3'-phosphorothioate
  modified_base 11: mod_base = OTHER; note = 2'-O,4'-C-methylene 5-methyluridine-3'-phosphorothioate
  modified_base 12: mod_base = OTHER; note = 2'-O-methyluridine-3'-phosphorothioate
  modified_base 13: mod_base = OTHER; note = 2'-O,4'-C-methylene 5-methyluridine-3'-phosphorothioate
  modified_base 14: mod_base = OTHER; note = 2'-O-methyladenosine-3'-phosphorothioate
  modified_base 15: mod_base = OTHER; note = 2'-O,4'-C-methylene 5-methylcytidine-3'-phosphorothioate
  modified_base 16: mod_base = OTHER; note = 2'-O-methyluridine-3'-phosphorothioate
  modified_base 17: mod_base = OTHER; note = 2'-O,4'-C-methylene 5-methyluridine-3'-phosphorothioate
  modified_base 18: mod_base = OTHER; note = 2'-O,4'-C-methylene 5-methylcytidine-3'-phosphorothioate
  modified_base 19: mod_base = OTHER; note = 2'-O-methyladenosine-3'-phosphate
  modified_base 20: mod_base = OTHER; note = 2'-deoxyadenosine-3'-phosphate ((2S,4R)-1-[29-[[2-(acetylamino)-2-deoxy-beta-D-galactopyra nosyl]oxy]-14,14-bis[[3-[[3-[[5-[[2-(acetylamino)-2-deoxy-b eta-D-galactopyranosyl]oxy]-1-oxopentyl]amino]propyl]amino] -3-oxopropoxy]methyl]-1,12,19,25-tetraoxo-16-oxa-13,20,24-t riazanonacos-1-yl]-4-hydroxy-2-pyrrolidinyl)methyl ester
  misc_feature 1..19: note = RNA
  misc_feature 20: note = DNA
gttaacaccatttacttcaa

SEQ ID NO: 28 - DNA, 20 bp, synthetic construct
  source 1..20: mol_type = other DNA
  modified_base 1: mod_base = OTHER; note = 2'-O-methylguanosine-3'-phosphorothioate
  modified_base 2: mod_base = OTHER; note = 2'-O,4'-C-methylmethylene 5-methyluridine-3'-phosphorothioate
  modified_base 3: mod_base = OTHER; note = 2'-O,4'-C-methylmethylene 5-methyluridine-3'-phosphorothioate
  modified_base 4: mod_base = OTHER; note = 2'-O-methyladenosine-3'-phosphorothioate
  modified_base 5: mod_base = OTHER; note = 2'-O-methyladenosine-3'-phosphorothioate
  modified_base 6: mod_base = OTHER; note = 2'-O,4'-C-methylmethylene 5-methylcytidine-3'-phosphorothioate
  modified_base 7: mod_base = OTHER; note = 2'-O-methyladenosine-3'-phosphorothioate
  modified_base 8: mod_base = OTHER; note = 2'-O,4'-C-methylmethylene 5-methylcytidine-3'-phosphorothioate
  modified_base 9: mod_base = OTHER; note = 2'-O,4'-C-methylmethylene 5-methylcytidine-3'-phosphorothioate
  modified_base 10: mod_base = OTHER; note = 2'-O-methyladenosine-3'-phosphorothioate
  modified_base 11: mod_base = OTHER; note = 2'-O-methyluridine-3'-phosphorothioate
  modified_base 12: mod_base = OTHER; note = 2'-O-methyluridine-3'-phosphorothioate
  modified_base 13: mod_base = OTHER; note = 2'-O-methyluridine-3'-phosphorothioate
  modified_base 14: mod_base = OTHER; note = 2'-O-methyladenosine-3'-phosphorothioate
  modified_base 15: mod_base = OTHER; note = 2'-O-methylcytidine-3'-phosphorothioate
  modified_base 16: mod_base = OTHER; note = 2'-O-methyluridine-3'-phosphorothioate
  modified_base 17: mod_base = OTHER; note = 2'-O-methyluridine-3'-phosphorothioate
  modified_base 18: mod_base = OTHER; note = 2'-O-methylcytidine-3'-phosphorothioate
  modified_base 19: mod_base = OTHER; note = 2'-O-methyladenosine-3'-phosphate
  modified_base 20: mod_base = OTHER; note = 2'-deoxyadenosine-3'-phosphate ((2S,4R)-1-[29-[[2-(acetylamino)-2-deoxy-beta-D-galactopyra nosyl]oxy]-14,14-bis[[3-[[3-[[5-[[2-(acetylamino)-2-deoxy-b eta-D-galactopyranosyl]oxy]-1-oxopentyl]amino]propyl]amino] -3-oxopropoxy]methyl]-1,12,19,25-tetraoxo-16-oxa-13,20,24-t riazanonacos-1-yl]-4-hydroxy-2-pyrrolidinyl)methyl ester
  misc_feature 1..19: note = RNA
  misc_feature 20: note = DNA
gttaacaccatttacttcaa

SEQ ID NO: 29 - DNA, 20 bp, synthetic construct
  source 1..20: mol_type = other DNA
  modified_base 1: mod_base = OTHER; note = 2'-O-methylguanosine-3'-phosphorothioate
  modified_base 2: mod_base = OTHER; note = 2'-O,4'-C-methylene 5-methyluridine-3'-phosphorothioate
  modified_base 3: mod_base = OTHER; note = 2'-O,4'-C-methylene 5-methyluridine-3'-phosphorothioate
  modified_base 4: mod_base = OTHER; note = 2'-O-methyladenosine-3'-phosphorothioate
  modified_base 5: mod_base = OTHER; note = 2'-O-methyladenosine-3'-phosphorothioate
  modified_base 6: mod_base = OTHER; note = 2'-O,4'-C-methylene 5-methylcytidine-3'-phosphorothioate
  modified_base 7: mod_base = OTHER; note = 2'-O-methyladenosine-3'-phosphorothioate
  modified_base 8: mod_base = OTHER; note = 2'-O,4'-C-methylene 5-methylcytidine-3'-phosphorothioate
  modified_base 9: mod_base = OTHER; note = 2'-O,4'-C-methylene 5-methylcytidine-3'-phosphorothioate
  modified_base 10: mod_base = OTHER; note = 2'-O-methyladenosine-3'-phosphorothioate
  modified_base 11: mod_base = OTHER; note = 2'-O-methyluridine-3'-phosphorothioate
  modified_base 12: mod_base = OTHER; note = 2'-O-methyluridine-3'-phosphorothioate
  modified_base 13: mod_base = OTHER; note = 2'-O-methyluridine-3'-phosphorothioate
  modified_base 14: mod_base = OTHER; note = 2'-O-methyladenosine-3'-phosphorothioate
  modified_base 15: mod_base = OTHER; note = 2'-O-methylcytidine-3'-phosphorothioate
  modified_base 16: mod_base = OTHER; note = 2'-O-methyluridine-3'-phosphorothioate
  modified_base 17: mod_base = OTHER; note = 2'-O-methyluridine-3'-phosphorothioate
  modified_base 18: mod_base = OTHER; note = 2'-O-methylcytidine-3'-phosphorothioate
  modified_base 19: mod_base = OTHER; note = 2'-O-methyladenosine-3'-phosphate
  modified_base 20: mod_base = OTHER; note = 2'-deoxyadenosine-3'-phosphate ((2S,4R)-1-[29-[[2-(acetylamino)-2-deoxy-beta-D-galactopyra nosyl]oxy]-14,14-bis[[3-[[3-[[5-[[2-(acetylamino)-2-deoxy-b eta-D-galactopyranosyl]oxy]-1-oxopentyl]amino]propyl]amino] -3-oxopropoxy]methyl]-1,12,19,25-tetraoxo-16-oxa-13,20,24-t riazanonacos-1-yl]-4-hydroxy-2-pyrrolidinyl)methyl ester
  misc_feature 1..19: note = RNA
  misc_feature 20: note = DNA
gttaacaccatttacttcaa

SEQ ID NO: 30 - DNA, 20 bp, synthetic construct
  source 1..20: mol_type = other DNA
  modified_base 1: mod_base = OTHER; note = 2'-O-methylguanosine-3'-phosphorothioate
  modified_base 2: mod_base = OTHER; note = 2'-O-methyluridine-3'-phosphorothioate
  modified_base 3: mod_base = OTHER; note = 2'-O-methyluridine-3'-phosphorothioate
  modified_base 4: mod_base = OTHER; note = 2'-O-methyladenosine-3'-phosphorothioate
  modified_base 5: mod_base = OTHER; note = 2'-O-methyladenosine-3'-phosphorothioate
  modified_base 6: mod_base = OTHER; note = 2'-O-methylcytidine-3'-phosphorothioate
  modified_base 7: mod_base = OTHER; note = 2'-O-methyladenosine-3'-phosphorothioate
  modified_base 8: mod_base = OTHER; note = 2'-O,4'-C-methylmethylene 5-methylcytidine-3'-phosphorothioate
  modified_base 9: mod_base = OTHER; note = 2'-O,4'-C-methylmethylene 5-methylcytidine-3'-phosphorothioate
  modified_base 10: mod_base = OTHER; note = 2'-O-methyladenosine-3'-phosphorothioate
  modified_base 11: mod_base = OTHER; note = 2'-O,4'-C-methylmethylene 5-methyluridine-3'-phosphorothioate
  modified_base 12: mod_base = OTHER; note = 2'-O,4'-C-methylmethylene 5-methyluridine-3'-phosphorothioate
  modified_base 13: mod_base = OTHER; note = 2'-O,4'-C-methylmethylene 5-methyluridine-3'-phosphorothioate
  modified_base 14: mod_base = OTHER; note = 2'-O-methyladenosine-3'-phosphorothioate
  modified_base 15: mod_base = OTHER; note = 2'-O-methylcytidine-3'-phosphorothioate
  modified_base 16: mod_base = OTHER; note = 2'-O-methyluridine-3'-phosphorothioate
  modified_base 17: mod_base = OTHER; note = 2'-O-methyluridine-3'-phosphorothioate
  modified_base 18: mod_base = OTHER; note = 2'-O-methylcytidine-3'-phosphorothioate
  modified_base 19: mod_base = OTHER; note = 2'-O-methyladenosine-3'-phosphate
  modified_base 20: mod_base = OTHER; note = 2'-deoxyadenosine-3'-phosphate ((2S,4R)-1-[29-[[2-(acetylamino)-2-deoxy-beta-D-galactopyra nosyl]oxy]-14,14-bis[[3-[[3-[[5-[[2-(acetylamino)-2-deoxy-b eta-D-galactopyranosyl]oxy]-1-oxopentyl]amino]propyl]amino] -3-oxopropoxy]methyl]-1,12,19,25-tetraoxo-16-oxa-13,20,24-t riazanonacos-1-yl]-4-hydroxy-2-pyrrolidinyl)methyl ester
  misc_feature 1..19: note = RNA
  misc_feature 20: note = DNA
gttaacaccatttacttcaa

SEQ ID NO: 31 - DNA, 20 bp, synthetic construct
  source 1..20: mol_type = other DNA
  modified_base 1: mod_base = OTHER; note = 2'-O-methylguanosine-3'-phosphorothioate
  modified_base 2: mod_base = OTHER; note = 2'-O-methyluridine-3'-phosphorothioate
  modified_base 3: mod_base = OTHER; note = 2'-O-methyluridine-3'-phosphorothioate
  modified_base 4: mod_base = OTHER; note = 2'-O-methyladenosine-3'-phosphorothioate
  modified_base 5: mod_base = OTHER; note = 2'-O-methyladenosine-3'-phosphorothioate
  modified_base 6: mod_base = OTHER; note = 2'-O-methylcytidine-3'-phosphorothioate
  modified_base 7: mod_base = OTHER; note = 2'-O-methyladenosine-3'-phosphorothioate
  modified_base 8: mod_base = OTHER; note = 2'-O,4'-C-methylene 5-methylcytidine-3'-phosphorothioate
  modified_base 9: mod_base = OTHER; note = 2'-O,4'-C-methylene 5-methylcytidine-3'-phosphorothioate
  modified_base 10: mod_base = OTHER; note = 2'-O-methyladenosine-3'-phosphorothioate
  modified_base 11: mod_base = OTHER; note = 2'-O,4'-C-methylene 5-methyluridine-3'-phosphorothioate
  modified_base 12: mod_base = OTHER; note = 2'-O,4'-C-methylene 5-methyluridine-3'-phosphorothioate
  modified_base 13: mod_base = OTHER; note = 2'-O,4'-C-methylene 5-methyluridine-3'-phosphorothioate
  modified_base 14: mod_base = OTHER; note = 2'-O-methyladenosine-3'-phosphorothioate
  modified_base 15: mod_base = OTHER; note = 2'-O-methylcytidine-3'-phosphorothioate
  modified_base 16: mod_base = OTHER; note = 2'-O-methyluridine-3'-phosphorothioate
  modified_base 17: mod_base = OTHER; note = 2'-O-methyluridine-3'-phosphorothioate
  modified_base 18: mod_base = OTHER; note = 2'-O-methylcytidine-3'-phosphorothioate
  modified_base 19: mod_base = OTHER; note = 2'-O-methyladenosine-3'-phosphate
  modified_base 20: mod_base = OTHER; note = 2'-deoxyadenosine-3'-phosphate ((2S,4R)-1-[29-[[2-(acetylamino)-2-deoxy-beta-D-galactopyra nosyl]oxy]-14,14-bis[[3-[[3-[[5-[[2-(acetylamino)-2-deoxy-b eta-D-galactopyranosyl]oxy]-1-oxopentyl]amino]propyl]amino] -3-oxopropoxy]methyl]-1,12,19,25-tetraoxo-16-oxa-13,20,24-t riazanonacos-1-yl]-4-hydroxy-2-pyrrolidinyl)methyl ester
  misc_feature 1..19: note = RNA
  misc_feature 20: note = DNA
gttaacaccatttacttcaa

SEQ ID NO: 32 - DNA, 20 bp, synthetic construct
  source 1..20: mol_type = other DNA
  modified_base 1: mod_base = OTHER; note = 2'-O-methylguanosine-3'-phosphorothioate
  modified_base 2: mod_base = OTHER; note = 2'-O,4'-C-methylmethylene 5-methyluridine-3'-phosphorothioate
  modified_base 3: mod_base = OTHER; note = 2'-O-methyluridine-3'-phosphorothioate
  modified_base 4: mod_base = OTHER; note = 2'-O-methyladenosine-3'-phosphorothioate
  modified_base 5: mod_base = OTHER; note = 2'-O-methyladenosine-3'-phosphorothioate
  modified_base 6: mod_base = OTHER; note = 2'-O,4'-C-methylmethylene 5-methylcytidine-3'-phosphorothioate
  modified_base 7: mod_base = OTHER; note = 2'-O-methyladenosine-3'-phosphorothioate
  modified_base 8: mod_base = OTHER; note = 2'-O-methylcytidine-3'-phosphorothioate
  modified_base 9: mod_base = OTHER; note = 2'-O-methylcytidine-3'-phosphorothioate
  modified_base 10: mod_base = OTHER; note = 2'-O-methyladenosine-3'-phosphorothioate
  modified_base 11: mod_base = OTHER; note = 2'-O,4'-C-methylmethylene 5-methyluridine-3'-phosphorothioate
  modified_base 12: mod_base = OTHER; note = 2'-O-methyluridine-3'-phosphorothioate
  modified_base 13: mod_base = OTHER; note = 2'-O-methyluridine-3'-phosphorothioate
  modified_base 14: mod_base = OTHER; note = 2'-O-methyladenosine-3'-phosphorothioate
  modified_base 15: mod_base = OTHER; note = 2'-O,4'-C-methylmethylene 5-methylcytidine-3'-phosphorothioate
  modified_base 16: mod_base = OTHER; note = 2'-O-methyluridine-3'-phosphorothioate
  modified_base 17: mod_base = OTHER; note = 2'-O-methyluridine-3'-phosphorothioate
  modified_base 18: mod_base = OTHER; note = 2'-O,4'-C-methylmethylene 5-methylcytidine-3'-phosphorothioate
  modified_base 19: mod_base = OTHER; note = 2'-O-methyladenosine-3'-phosphate
  modified_base 20: mod_base = OTHER; note = 2'-deoxyadenosine-3'-phosphate ((2S,4R)-1-[29-[[2-(acetylamino)-2-deoxy-beta-D-galactopyra nosyl]oxy]-14,14-bis[[3-[[3-[[5-[[2-(acetylamino)-2-deoxy-b eta-D-galactopyranosyl]oxy]-1-oxopentyl]amino]propyl]amino] -3-oxopropoxy]methyl]-1,12,19,25-tetraoxo-16-oxa-13,20,24-t riazanonacos-1-yl]-4-hydroxy-2-pyrrolidinyl)methyl ester
  misc_feature 1..19: note = RNA
  misc_feature 20: note = DNA
gttaacaccatttacttcaa

SEQ ID NO: 33 - DNA, 20 bp, synthetic construct
  source 1..20: mol_type = other DNA
  modified_base 1: mod_base = OTHER; note = 2'-O-methylguanosine-3'-phosphorothioate
  modified_base 2: mod_base = OTHER; note = 2'-O,4'-C-methylene 5-methyluridine-3'-phosphorothioate
  modified_base 3: mod_base = OTHER; note = 2'-O-methyluridine-3'-phosphorothioate
  modified_base 4: mod_base = OTHER; note = 2'-O-methyladenosine-3'-phosphorothioate
  modified_base 5: mod_base = OTHER; note = 2'-O-methyladenosine-3'-phosphorothioate
  modified_base 6: mod_base = OTHER; note = 2'-O,4'-C-methylene 5-methylcytidine-3'-phosphorothioate
  modified_base 7: mod_base = OTHER; note = 2'-O-methyladenosine-3'-phosphorothioate
  modified_base 8: mod_base = OTHER; note = 2'-O-methylcytidine-3'-phosphorothioate
  modified_base 9: mod_base = OTHER; note = 2'-O-methylcytidine-3'-phosphorothioate
  modified_base 10: mod_base = OTHER; note = 2'-O-methyladenosine-3'-phosphorothioate
  modified_base 11: mod_base = OTHER; note = 2'-O,4'-C-methylene 5-methyluridine-3'-phosphorothioate
  modified_base 12: mod_base = OTHER; note = 2'-O-methyluridine-3'-phosphorothioate
  modified_base 13: mod_base = OTHER; note = 2'-O-methyluridine-3'-phosphorothioate
  modified_base 14: mod_base = OTHER; note = 2'-O-methyladenosine-3'-phosphorothioate
  modified_base 15: mod_base = OTHER; note = 2'-O,4'-C-methylene 5-methylcytidine-3'-phosphorothioate
  modified_base 16: mod_base = OTHER; note = 2'-O-methyluridine-3'-phosphorothioate
  modified_base 17: mod_base = OTHER; note = 2'-O-methyluridine-3'-phosphorothioate
  modified_base 18: mod_base = OTHER; note = 2'-O,4'-C-methylene 5-methylcytidine-3'-phosphorothioate
  modified_base 19: mod_base = OTHER; note = 2'-O-methyladenosine-3'-phosphate
  modified_base 20: mod_base = OTHER; note = 2'-deoxyadenosine-3'-phosphate ((2S,4R)-1-[29-[[2-(acetylamino)-2-deoxy-beta-D-galactopyra nosyl]oxy]-14,14-bis[[3-[[3-[[5-[[2-(acetylamino)-2-deoxy-b eta-D-galactopyranosyl]oxy]-1-oxopentyl]amino]propyl]amino] -3-oxopropoxy]methyl]-1,12,19,25-tetraoxo-16-oxa-13,20,24-t riazanonacos-1-yl]-4-hydroxy-2-pyrrolidinyl)methyl ester
  misc_feature 1..19: note = RNA
  misc_feature 20: note = DNA
gttaacaccatttacttcaa

SEQ ID NO: 34 - DNA, 20 bp, synthetic construct
  source 1..20: mol_type = other DNA
  modified_base 1: mod_base = OTHER; note = 2'-O-methylguanosine-3'-phosphorothioate
  modified_base 2: mod_base = OTHER; note = 2'-O-methyluridine-3'-phosphorothioate
  modified_base 3: mod_base = OTHER; note = 2'-O-methyluridine-3'-phosphorothioate
  modified_base 4: mod_base = OTHER; note = 2'-O-methyladenosine-3'-phosphorothioate
  modified_base 5: mod_base = OTHER; note = 2'-O-methyladenosine-3'-phosphorothioate
  modified_base 6: mod_base = OTHER; note = 2'-O,4'-C-methylmethylene 5-methylcytidine-3'-phosphorothioate
  modified_base 7: mod_base = OTHER; note = 2'-O-methyladenosine-3'-phosphorothioate
  modified_base 8: mod_base = OTHER; note = 2'-O,4'-C-methylmethylene 5-methylcytidine-3'-phosphorothioate
  modified_base 9: mod_base = OTHER; note = 2'-O,4'-C-methylmethylene 5-methylcytidine-3'-phosphorothioate
  modified_base 10: mod_base = OTHER; note = 2'-O-methyladenosine-3'-phosphorothioate
  modified_base 11: mod_base = OTHER; note = 2'-O-methyluridine-3'-phosphorothioate
  modified_base 12: mod_base = OTHER; note = 2'-O-methyluridine-3'-phosphorothioate
  modified_base 13: mod_base = OTHER; note = 2'-O-methyluridine-3'-phosphorothioate
  modified_base 14: mod_base = OTHER; note = 2'-O-methyladenosine-3'-phosphorothioate
  modified_base 15: mod_base = OTHER; note = 2'-O,4'-C-methylmethylene 5-methylcytidine-3'-phosphorothioate
  modified_base 16: mod_base = OTHER; note = 2'-O-methyluridine-3'-phosphorothioate
  modified_base 17: mod_base = OTHER; note = 2'-O-methyluridine-3'-phosphorothioate
  modified_base 18: mod_base = OTHER; note = 2'-O,4'-C-methylmethylene 5-methylcytidine-3'-phosphorothioate
  modified_base 19: mod_base = OTHER; note = 2'-O-methyladenosine-3'-phosphate
  modified_base 20: mod_base = OTHER; note = 2'-deoxyadenosine-3'-phosphate ((2S,4R)-1-[29-[[2-(acetylamino)-2-deoxy-beta-D-galactopyra nosyl]oxy]-14,14-bis[[3-[[3-[[5-[[2-(acetylamino)-2-deoxy-b eta-D-galactopyranosyl]oxy]-1-oxopentyl]amino]propyl]amino] -3-oxopropoxy]methyl]-1,12,19,25-tetraoxo-16-oxa-13,20,24-t riazanonacos-1-yl]-4-hydroxy-2-pyrrolidinyl)methyl ester
  misc_feature 1..19: note = RNA
  misc_feature 20: note = DNA
gttaacaccatttacttcaa

SEQ ID NO: 35 - DNA, 20 bp, synthetic construct
  source 1..20: mol_type = other DNA
  modified_base 1: mod_base = OTHER; note = 2'-O-methylguanosine-3'-phosphorothioate
  modified_base 2: mod_base = OTHER; note = 2'-O-methyluridine-3'-phosphorothioate
  modified_base 3: mod_base = OTHER; note = 2'-O-methyluridine-3'-phosphorothioate
  modified_base 4: mod_base = OTHER; note = 2'-O-methyladenosine-3'-phosphorothioate
  modified_base 5: mod_base = OTHER; note = 2'-O-methyladenosine-3'-phosphorothioate
  modified_base 6: mod_base = OTHER; note = 2'-O,4'-C-methylene 5-methylcytidine-3'-phosphorothioate
  modified_base 7: mod_base = OTHER; note = 2'-O-methyladenosine-3'-phosphorothioate
  modified_base 8: mod_base = OTHER; note = 2'-O,4'-C-methylene 5-methylcytidine-3'-phosphorothioate
  modified_base 9: mod_base = OTHER; note = 2'-O,4'-C-methylene 5-methylcytidine-3'-phosphorothioate
  modified_base 10: mod_base = OTHER; note = 2'-O-methyladenosine-3'-phosphorothioate
  modified_base 11: mod_base = OTHER; note = 2'-O-methyluridine-3'-phosphorothioate
  modified_base 12: mod_base = OTHER; note = 2'-O-methyluridine-3'-phosphorothioate
  modified_base 13: mod_base = OTHER; note = 2'-O-methyluridine-3'-phosphorothioate
  modified_base 14: mod_base = OTHER; note = 2'-O-methyladenosine-3'-phosphorothioate
  modified_base 15: mod_base = OTHER; note = 2'-O,4'-C-methylene 5-methylcytidine-3'-phosphorothioate
  modified_base 16: mod_base = OTHER; note = 2'-O-methyluridine-3'-phosphorothioate
  modified_base 17: mod_base = OTHER; note = 2'-O-methyluridine-3'-phosphorothioate
  modified_base 18: mod_base = OTHER; note = 2'-O,4'-C-methylene 5-methylcytidine-3'-phosphorothioate
  modified_base 19: mod_base = OTHER; note = 2'-O-methyladenosine-3'-phosphate
  modified_base 20: mod_base = OTHER; note = 2'-deoxyadenosine-3'-phosphate ((2S,4R)-1-[29-[[2-(acetylamino)-2-deoxy-beta-D-galactopyra nosyl]oxy]-14,14-bis[[3-[[3-[[5-[[2-(acetylamino)-2-deoxy-b eta-D-galactopyranosyl]oxy]-1-oxopentyl]amino]propyl]amino] -3-oxopropoxy]methyl]-1,12,19,25-tetraoxo-16-oxa-13,20,24-t riazanonacos-1-yl]-4-hydroxy-2-pyrrolidinyl)methyl ester
  misc_feature 1..19: note = RNA
  misc_feature 20: note = DNA
gttaacaccatttacttcaa

SEQ ID NO: 36 - DNA, 20 bp, synthetic construct
  source 1..20: mol_type = other DNA
  modified_base 1: mod_base = OTHER; note = 2'-O-methylguanosine-3'-phosphorothioate
  modified_base 2: mod_base = OTHER; note = 2'-O-methyluridine-3'-phosphorothioate
  modified_base 3: mod_base = OTHER; note = 2'-O-methyluridine-3'-phosphorothioate
  modified_base 4: mod_base = OTHER; note = 2'-O-methyladenosine-3'-phosphorothioate
  modified_base 5: mod_base = OTHER; note = 2'-O-methyladenosine-3'-phosphorothioate
  modified_base 6: mod_base = OTHER; note = 2'-O,4'-C-methylmethylene 5-methylcytidine-3'-phosphorothioate
  modified_base 7: mod_base = OTHER; note = 2'-O-methyladenosine-3'-phosphorothioate
  modified_base 8: mod_base = OTHER; note = 2'-O-methylcytidine-3'-phosphorothioate
  modified_base 9: mod_base = OTHER; note = 2'-O,4'-C-methylmethylene 5-methylcytidine-3'-phosphorothioate
  modified_base 10: mod_base = OTHER; note = 2'-O-methyladenosine-3'-phosphorothioate
  modified_base 11: mod_base = OTHER; note = 2'-O-methyluridine-3'-phosphorothioate
  modified_base 12: mod_base = OTHER; note = 2'-O-methyluridine-3'-phosphorothioate
  modified_base 13: mod_base = OTHER; note = 2'-O-methyluridine-3'-phosphorothioate
  modified_base 14: mod_base = OTHER; note = 2'-O-methyladenosine-3'-phosphorothioate
  modified_base 15: mod_base = OTHER; note = 2'-O,4'-C-methylmethylene 5-methylcytidine-3'-phosphorothioate
  modified_base 16: mod_base = OTHER; note = 2'-O-methyluridine-3'-phosphorothioate
  modified_base 17: mod_base = OTHER; note = 2'-O-methyluridine-3'-phosphorothioate
  modified_base 18: mod_base = OTHER; note = 2'-O,4'-C-methylmethylene 5-methylcytidine-3'-phosphorothioate
  modified_base 19: mod_base = OTHER; note = 2'-O-methyladenosine-3'-phosphate
  modified_base 20: mod_base = OTHER; note = 2'-deoxyadenosine-3'-phosphate ((2S,4R)-1-[29-[[2-(acetylamino)-2-deoxy-beta-D-galactopyra nosyl]oxy]-14,14-bis[[3-[[3-[[5-[[2-(acetylamino)-2-deoxy-b eta-D-galactopyranosyl]oxy]-1-oxopentyl]amino]propyl]amino] -3-oxopropoxy]methyl]-1,12,19,25-tetraoxo-16-oxa-13,20,24-t riazanonacos-1-yl]-4-hydroxy-2-pyrrolidinyl)methyl ester
  misc_feature 1..19: note = RNA
  misc_feature 20: note = DNA
gttaacaccatttacttcaa

SEQ ID NO: 37 - DNA, 20 bp, synthetic construct
  source 1..20: mol_type = other DNA
  modified_base 1: mod_base = OTHER; note = 2'-O-methylguanosine-3'-phosphorothioate
  modified_base 2: mod_base = OTHER; note = 2'-O-methyluridine-3'-phosphorothioate
  modified_base 3: mod_base = OTHER; note = 2'-O-methyluridine-3'-phosphorothioate
  modified_base 4: mod_base = OTHER; note = 2'-O-methyladenosine-3'-phosphorothioate
  modified_base 5: mod_base = OTHER; note = 2'-O-methyladenosine-3'-phosphorothioate
  modified_base 6: mod_base = OTHER; note = 2'-O,4'-C-methylene 5-methylcytidine-3'-phosphorothioate
  modified_base 7: mod_base = OTHER; note = 2'-O-methyladenosine-3'-phosphorothioate
  modified_base 8: mod_base = OTHER; note = 2'-O-methylcytidine-3'-phosphorothioate
  modified_base 9: mod_base = OTHER; note = 2'-O,4'-C-methylene 5-methylcytidine-3'-phosphorothioate
  modified_base 10: mod_base = OTHER; note = 2'-O-methyladenosine-3'-phosphorothioate
  modified_base 11: mod_base = OTHER; note = 2'-O-methyluridine-3'-phosphorothioate
  modified_base 12: mod_base = OTHER; note = 2'-O-methyluridine-3'-phosphorothioate
  modified_base 13: mod_base = OTHER; note = 2'-O-methyluridine-3'-phosphorothioate
  modified_base 14: mod_base = OTHER; note = 2'-O-methyladenosine-3'-phosphorothioate
  modified_base 15: mod_base = OTHER; note = 2'-O,4'-C-methylene 5-methylcytidine-3'-phosphorothioate
  modified_base 16: mod_base = OTHER; note = 2'-O-methyluridine-3'-phosphorothioate
  modified_base 17: mod_base = OTHER; note = 2'-O-methyluridine-3'-phosphorothioate
  modified_base 18: mod_base = OTHER; note = 2'-O,4'-C-methylene 5-methylcytidine-3'-phosphorothioate
  modified_base 19: mod_base = OTHER; note = 2'-O-methyladenosine-3'-phosphate
  modified_base 20: mod_base = OTHER; note = 2'-deoxyadenosine-3'-phosphate ((2S,4R)-1-[29-[[2-(acetylamino)-2-deoxy-beta-D-galactopyra nosyl]oxy]-14,14-bis[[3-[[3-[[5-[[2-(acetylamino)-2-deoxy-b eta-D-galactopyranosyl]oxy]-1-oxopentyl]amino]propyl]amino] -3-oxopropoxy]methyl]-1,12,19,25-tetraoxo-16-oxa-13,20,24-t riazanonacos-1-yl]-4-hydroxy-2-pyrrolidinyl)methyl ester
  misc_feature 1..19: note = RNA
  misc_feature 20: note = DNA
gttaacaccatttacttcaa

SEQ ID NO: 38 - DNA, 20 bp, synthetic construct
  source 1..20: mol_type = other DNA
  modified_base 1: mod_base = OTHER; note = 2'-O-methylguanosine-3'-phosphorothioate
  modified_base 2: mod_base = OTHER; note = 2'-O-methyluridine-3'-phosphorothioate
  modified_base 3: mod_base = OTHER; note = 2'-O-methyluridine-3'-phosphorothioate
  modified_base 4: mod_base = OTHER; note = 2'-O-methyladenosine-3'-phosphorothioate
  modified_base 5: mod_base = OTHER; note = 2'-O-methyladenosine-3'-phosphorothioate
  modified_base 6: mod_base = OTHER; note = 2'-O,4'-C-methylmethylene 5-methylcytidine-3'-phosphorothioate
  modified_base 7: mod_base = OTHER; note = 2'-O-methyladenosine-3'-phosphorothioate
  modified_base 8: mod_base = OTHER; note = 2'-O-methylcytidine-3'-phosphorothioate
  modified_base 9: mod_base = OTHER; note = 2'-O,4'-C-methylmethylene 5-methylcytidine-3'-phosphorothioate
  modified_base 10: mod_base = OTHER; note = 2'-O-methyladenosine-3'-phosphorothioate
  modified_base 11: mod_base = OTHER; note = 2'-O,4'-C-methylmethylene 5-methyluridine-3'-phosphorothioate
  modified_base 12: mod_base = OTHER; note = 2'-O-methyluridine-3'-phosphorothioate
  modified_base 13: mod_base = OTHER; note = 2'-O-methyluridine-3'-phosphorothioate
  modified_base 14: mod_base = OTHER; note = 2'-O-methyladenosine-3'-phosphorothioate
  modified_base 15: mod_base = OTHER; note = 2'-O-methylcytidine-3'-phosphorothioate
  modified_base 16: mod_base = OTHER; note = 2'-O-methyluridine-3'-phosphorothioate
  modified_base 17: mod_base = OTHER; note = 2'-O-methyluridine-3'-phosphorothioate
  modified_base 18: mod_base = OTHER; note = 2'-O,4'-C-methylmethylene 5-methylcytidine-3'-phosphorothioate
  modified_base 19: mod_base = OTHER; note = 2'-O-methyladenosine-3'-phosphate
  modified_base 20: mod_base = OTHER; note = 2'-deoxyadenosine-3'-phosphate ((2S,4R)-1-[29-[[2-(acetylamino)-2-deoxy-beta-D-galactopyra nosyl]oxy]-14,14-bis[[3-[[3-[[5-[[2-(acetylamino)-2-deoxy-b eta-D-galactopyranosyl]oxy]-1-oxopentyl]amino]propyl]amino] -3-oxopropoxy]methyl]-1,12,19,25-tetraoxo-16-oxa-13,20,24-t riazanonacos-1-yl]-4-hydroxy-2-pyrrolidinyl)methyl ester
  misc_feature 1..19: note = RNA
  misc_feature 20: note = DNA
gttaacaccatttacttcaa

SEQ ID NO: 39 - DNA, 20 bp, synthetic construct
  source 1..20: mol_type = other DNA
  modified_base 1: mod_base = OTHER; note = 2'-O-methylguanosine-3'-phosphorothioate
  modified_base 2: mod_base = OTHER; note = 2'-O-methyluridine-3'-phosphorothioate
  modified_base 3: mod_base = OTHER; note = 2'-O-methyluridine-3'-phosphorothioate
  modified_base 4: mod_base = OTHER; note = 2'-O-methyladenosine-3'-phosphorothioate
  modified_base 5: mod_base = OTHER; note = 2'-O-methyladenosine-3'-phosphorothioate
  modified_base 6: mod_base = OTHER; note = 2'-O-methylcytidine-3'-phosphorothioate
  modified_base 7: mod_base = OTHER; note = 2'-O-methyladenosine-3'-phosphorothioate
  modified_base 8: mod_base = OTHER; note = 2'-O-methylcytidine-3'-phosphorothioate
  modified_base 9: mod_base = OTHER; note = 2'-O,4'-C-methylmethylene 5-methylcytidine-3'-phosphorothioate
  modified_base 10: mod_base = OTHER; note = 2'-O-methyladenosine-3'-phosphorothioate
  modified_base 11: mod_base = OTHER; note = 2'-O,4'-C-methylmethylene 5-methyluridine-3'-phosphorothioate
  modified_base 12: mod_base = OTHER; note = 2'-O-methyluridine-3'-phosphorothioate
  modified_base 13: mod_base = OTHER; note = 2'-O-methyluridine-3'-phosphorothioate
  modified_base 14: mod_base = OTHER; note = 2'-O-methyladenosine-3'-phosphorothioate
  modified_base 15: mod_base = OTHER; note = 2'-O-methylcytidine-3'-phosphorothioate
  modified_base 16: mod_base = OTHER; note = 2'-O-methyluridine-3'-phosphorothioate
  modified_base 17: mod_base = OTHER; note = 2'-O,4'-C-methylmethylene 5-methyluridine-3'-phosphorothioate
  modified_base 18: mod_base = OTHER; note = 2'-O,4'-C-methylmethylene 5-methylcytidine-3'-phosphorothioate
  modified_base 19: mod_base = OTHER; note = 2'-O-methyladenosine-3'-phosphate
  modified_base 20: mod_base = OTHER; note = 2'-deoxyadenosine-3'-phosphate ((2S,4R)-1-[29-[[2-(acetylamino)-2-deoxy-beta-D-galactopyra nosyl]oxy]-14,14-bis[[3-[[3-[[5-[[2-(acetylamino)-2-deoxy-b eta-D-galactopyranosyl]oxy]-1-oxopentyl]amino]propyl]amino] -3-oxopropoxy]methyl]-1,12,19,25-tetraoxo-16-oxa-13,20,24-t riazanonacos-1-yl]-4-hydroxy-2-pyrrolidinyl)methyl ester
  misc_feature 1..19: note = RNA
  misc_feature 20: note = DNA
gttaacaccatttacttcaa

SEQ ID NO: 40 - DNA, 20 bp, synthetic construct
  source 1..20: mol_type = other DNA
  modified_base 1: mod_base = OTHER; note = 2'-O-methylguanosine-3'-phosphorothioate
  modified_base 2: mod_base = OTHER; note = 2'-O-methyluridine-3'-phosphorothioate
  modified_base 3: mod_base = OTHER; note = 2'-O-methyluridine-3'-phosphorothioate
  modified_base 4: mod_base = OTHER; note = 2'-O-methyladenosine-3'-phosphorothioate
  modified_base 5: mod_base = OTHER; note = 2'-O-methyladenosine-3'-phosphorothioate
  modified_base 6: mod_base = OTHER; note = 2'-O-methylcytidine-3'-phosphorothioate
  modified_base 7: mod_base = OTHER; note = 2'-O-methyladenosine-3'-phosphorothioate
  modified_base 8: mod_base = OTHER; note = 2'-O-methylcytidine-3'-phosphorothioate
  modified_base 9: mod_base = OTHER; note = 2'-O-methylcytidine-3'-phosphorothioate
  modified_base 10: mod_base = OTHER; note = 2'-O-methyladenosine-3'-phosphorothioate
  modified_base 11: mod_base = OTHER; note = 2'-O,4'-C-methylmethylene 5-methyluridine-3'-phosphorothioate
  modified_base 12: mod_base = OTHER; note = 2'-O-methyluridine-3'-phosphorothioate
  modified_base 13: mod_base = OTHER; note = 2'-O,4'-C-methylmethylene 5-methyluridine-3'-phosphorothioate
  modified_base 14: mod_base = OTHER; note = 2'-O-methyladenosine-3'-phosphorothioate
  modified_base 15: mod_base = OTHER; note = 2'-O-methylcytidine-3'-phosphorothioate
  modified_base 16: mod_base = OTHER; note = 2'-O,4'-C-methylmethylene 5-methyluridine-3'-phosphorothioate
  modified_base 17: mod_base = OTHER; note = 2'-O-methyluridine-3'-phosphorothioate
  modified_base 18: mod_base = OTHER; note = 2'-O,4'-C-methylmethylene 5-methylcytidine-3'-phosphorothioate
  modified_base 19: mod_base = OTHER; note = 2'-O-methyladenosine-3'-phosphate
  modified_base 20: mod_base = OTHER; note = 2'-deoxyadenosine-3'-phosphate ((2S,4R)-1-[29-[[2-(acetylamino)-2-deoxy-beta-D-galactopyra nosyl]oxy]-14,14-bis[[3-[[3-[[5-[[2-(acetylamino)-2-deoxy-b eta-D-galactopyranosyl]oxy]-1-oxopentyl]amino]propyl]amino] -3-oxopropoxy]methyl]-1,12,19,25-tetraoxo-16-oxa-13,20,24-t riazanonacos-1-yl]-4-hydroxy-2-pyrrolidinyl)methyl ester
  misc_feature 1..19: note = RNA
  misc_feature 20: note = DNA
gttaacaccatttacttcaa

SEQ ID NO: 41 - DNA, 20 bp, synthetic construct
  source 1..20: mol_type = other DNA
  modified_base 1: mod_base = OTHER; note = 2'-O-methylguanosine-3'-phosphorothioate
  modified_base 2: mod_base = OTHER; note = 2'-O-methyluridine-3'-phosphorothioate
  modified_base 3: mod_base = OTHER; note = 2'-O-methyluridine-3'-phosphorothioate
  modified_base 4: mod_base = OTHER; note = 2'-O-methyladenosine-3'-phosphorothioate
  modified_base 5: mod_base = OTHER; note = 2'-O-methyladenosine-3'-phosphorothioate
  modified_base 6: mod_base = OTHER; note = 2'-O-methylcytidine-3'-phosphorothioate
  modified_base 7: mod_base = OTHER; note = 2'-O-methyladenosine-3'-phosphorothioate
  modified_base 8: mod_base = OTHER; note = 2'-O-methylcytidine-3'-phosphorothioate
  modified_base 9: mod_base = OTHER; note = 2'-O-methylcytidine-3'-phosphorothioate
  modified_base 10: mod_base = OTHER; note = 2'-O-methyladenosine-3'-phosphorothioate
  modified_base 11: mod_base = OTHER; note = 2'-O,4'-C-methylmethylene 5-methyluridine-3'-phosphorothioate
  modified_base 12: mod_base = OTHER; note = 2'-O-methyluridine-3'-phosphorothioate
  modified_base 13: mod_base = OTHER; note = 2'-O-methyluridine-3'-phosphorothioate
  modified_base 14: mod_base = OTHER; note = 2'-O-methyladenosine-3'-phosphorothioate
  modified_base 15: mod_base = OTHER; note = 2'-O-methylcytidine-3'-phosphorothioate
  modified_base 16: mod_base = OTHER; note = 2'-O,4'-C-methylmethylene 5-methyluridine-3'-phosphorothioate
  modified_base 17: mod_base = OTHER; note = 2'-O,4'-C-methylmethylene 5-methyluridine-3'-phosphorothioate
  modified_base 18: mod_base = OTHER; note = 2'-O,4'-C-methylmethylene 5-methylcytidine-3'-phosphorothioate
  modified_base 19: mod_base = OTHER; note = 2'-O-methyladenosine-3'-phosphate
  modified_base 20: mod_base = OTHER; note = 2'-deoxyadenosine-3'-phosphate ((2S,4R)-1-[29-[[2-(acetylamino)-2-deoxy-beta-D-galactopyra nosyl]oxy]-14,14-bis[[3-[[3-[[5-[[2-(acetylamino)-2-deoxy-b eta-D-galactopyranosyl]oxy]-1-oxopentyl]amino]propyl]amino] -3-oxopropoxy]methyl]-1,12,19,25-tetraoxo-16-oxa-13,20,24-t riazanonacos-1-yl]-4-hydroxy-2-pyrrolidinyl)methyl ester
  misc_feature 1..19: note = RNA
  misc_feature 20: note = DNA
gttaacaccatttacttcaa

SEQ ID NO: 42 - DNA, 20 bp, synthetic construct
  source 1..20: mol_type = other DNA
  modified_base 1: mod_base = OTHER; note = 2'-O-methylguanosine-3'-phosphorothioate
  modified_base 2: mod_base = OTHER; note = 2'-O,4'-C-methylmethylene 5-methyluridine-3'-phosphorothioate
  modified_base 3: mod_base = OTHER; note = 2'-O-methyluridine-3'-phosphorothioate
  modified_base 4: mod_base = OTHER; note = 2'-O-methyladenosine-3'-phosphorothioate
  modified_base 5: mod_base = OTHER; note = 2'-O-methyladenosine-3'-phosphorothioate
  modified_base 6: mod_base = OTHER; note = 2'-O,4'-C-methylmethylene 5-methylcytidine-3'-phosphorothioate
  modified_base 7: mod_base = OTHER; note = 2'-O-methyladenosine-3'-phosphorothioate
  modified_base 8: mod_base = OTHER; note = 2'-O-methylcytidine-3'-phosphorothioate
  modified_base 9: mod_base = OTHER; note = 2'-O,4'-C-methylmethylene 5-methylcytidine-3'-phosphorothioate
  modified_base 10: mod_base = OTHER; note = 2'-O-methyladenosine-3'-phosphorothioate
  modified_base 11: mod_base = OTHER; note = 2'-O,4'-C-methylmethylene 5-methyluridine-3'-phosphorothioate
  modified_base 12: mod_base = OTHER; note = 2'-O-methyluridine-3'-phosphorothioate
  modified_base 13: mod_base = OTHER; note = 2'-O-methyluridine-3'-phosphorothioate
  modified_base 14: mod_base = OTHER; note = 2'-O-methyladenosine-3'-phosphorothioate
  modified_base 15: mod_base = OTHER; note = 2'-O-methylcytidine-3'-phosphorothioate
  modified_base 16: mod_base = OTHER; note = 2'-O-methyluridine-3'-phosphorothioate
  modified_base 17: mod_base = OTHER; note = 2'-O-methyluridine-3'-phosphorothioate
  modified_base 18: mod_base = OTHER; note = 2'-O-methylcytidine-3'-phosphorothioate
  modified_base 19: mod_base = OTHER; note = 2'-O-methyladenosine-3'-phosphate
  modified_base 20: mod_base = OTHER; note = 2'-deoxyadenosine-3'-phosphate ((2S,4R)-1-[29-[[2-(acetylamino)-2-deoxy-beta-D-galactopyra nosyl]oxy]-14,14-bis[[3-[[3-[[5-[[2-(acetylamino)-2-deoxy-b eta-D-galactopyranosyl]oxy]-1-oxopentyl]amino]propyl]amino] -3-oxopropoxy]methyl]-1,12,19,25-tetraoxo-16-oxa-13,20,24-t riazanonacos-1-yl]-4-hydroxy-2-pyrrolidinyl)methyl ester
  misc_feature 1..19: note = RNA
  misc_feature 20: note = DNA
gttaacaccatttacttcaa

SEQ ID NO: 43 - DNA, 20 bp, synthetic construct
  source 1..20: mol_type = other DNA
  modified_base 1: mod_base = OTHER; note = 2'-O-methylguanosine-3'-phosphorothioate
  modified_base 2: mod_base = OTHER; note = 2'-O,4'-C-methylmethylene 5-methyluridine-3'-phosphorothioate
  modified_base 3: mod_base = OTHER; note = 2'-O,4'-C-methylmethylene 5-methyluridine-3'-phosphorothioate
  modified_base 4: mod_base = OTHER; note = 2'-O-methyladenosine-3'-phosphorothioate
  modified_base 5: mod_base = OTHER; note = 2'-O-methyladenosine-3'-phosphorothioate
  modified_base 6: mod_base = OTHER; note = 2'-O,4'-C-methylmethylene 5-methylcytidine-3'-phosphorothioate
  modified_base 7: mod_base = OTHER; note = 2'-O-methyladenosine-3'-phosphorothioate
  modified_base 8: mod_base = OTHER; note = 2'-O-methylcytidine-3'-phosphorothioate
  modified_base 9: mod_base = OTHER; note = 2'-O-methylcytidine-3'-phosphorothioate
  modified_base 10: mod_base = OTHER; note = 2'-O-methyladenosine-3'-phosphorothioate
  modified_base 11: mod_base = OTHER; note = 2'-O,4'-C-methylmethylene 5-methyluridine-3'-phosphorothioate
  modified_base 12: mod_base = OTHER; note = 2'-O-methyluridine-3'-phosphorothioate
  modified_base 13: mod_base = OTHER; note = 2'-O-methyluridine-3'-phosphorothioate
  modified_base 14: mod_base = OTHER; note = 2'-O-methyladenosine-3'-phosphorothioate
  modified_base 15: mod_base = OTHER; note = 2'-O-methylcytidine-3'-phosphorothioate
  modified_base 16: mod_base = OTHER; note = 2'-O-methyluridine-3'-phosphorothioate
  modified_base 17: mod_base = OTHER; note = 2'-O-methyluridine-3'-phosphorothioate
  modified_base 18: mod_base = OTHER; note = 2'-O-methylcytidine-3'-phosphorothioate
  modified_base 19: mod_base = OTHER; note = 2'-O-methyladenosine-3'-phosphate
  modified_base 20: mod_base = OTHER; note = 2'-deoxyadenosine-3'-phosphate ((2S,4R)-1-[29-[[2-(acetylamino)-2-deoxy-beta-D-galactopyra nosyl]oxy]-14,14-bis[[3-[[3-[[5-[[2-(acetylamino)-2-deoxy-b eta-D-galactopyranosyl]oxy]-1-oxopentyl]amino]propyl]amino] -3-oxopropoxy]methyl]-1,12,19,25-tetraoxo-16-oxa-13,20,24-t riazanonacos-1-yl]-4-hydroxy-2-pyrrolidinyl)methyl ester
  misc_feature 1..19: note = RNA
  misc_feature 20: note = DNA
gttaacaccatttacttcaa

SEQ ID NO: 44 - DNA, 20 bp, synthetic construct
  source 1..20: mol_type = other DNA
  modified_base 1: mod_base = OTHER; note = 2'-O-methylguanosine-3'-phosphorothioate
  modified_base 2: mod_base = OTHER; note = 2'-O-methyluridine-3'-phosphorothioate
  modified_base 3: mod_base = OTHER; note = 2'-O-methyluridine-3'-phosphorothioate
  modified_base 4: mod_base = OTHER; note = 2'-O-methyladenosine-3'-phosphorothioate
  modified_base 5: mod_base = OTHER; note = 2'-O-methyladenosine-3'-phosphorothioate
  modified_base 6: mod_base = OTHER; note = 2'-O-methylcytidine-3'-phosphorothioate
  modified_base 7: mod_base = OTHER; note = 2'-O-methyladenosine-3'-phosphorothioate
  modified_base 8: mod_base = OTHER; note = 2'-O-methylcytidine-3'-phosphorothioate
  modified_base 9: mod_base = OTHER; note = 2'-O-methylcytidine-3'-phosphorothioate
  modified_base 10: mod_base = OTHER; note = 2'-O-methyladenosine-3'-phosphorothioate
  modified_base 11: mod_base = OTHER; note = 2'-O,4'-C-methylmethylene 5-methyluridine-3'-phosphorothioate
  modified_base 12: mod_base = OTHER; note = 2'-O-methyluridine-3'-phosphorothioate
  modified_base 13: mod_base = OTHER; note = 2'-O-methyluridine-3'-phosphorothioate
  modified_base 14: mod_base = OTHER; note = 2'-O-methyladenosine-3'-phosphorothioate
  modified_base 15: mod_base = OTHER; note = 2'-O-methylcytidine-3'-phosphorothioate
  modified_base 16: mod_base = OTHER; note = 2'-O,4'-C-methylmethylene 5-methyluridine-3'-phosphorothioate
  modified_base 17: mod_base = OTHER; note = 2'-O-methyluridine-3'-phosphorothioate
  modified_base 18: mod_base = OTHER; note = 2'-O,4'-C-methylmethylene 5-methylcytidine-3'-phosphorothioate
  modified_base 19: mod_base = OTHER; note = 2'-O-methyladenosine-3'-phosphate
  modified_base 20: mod_base = OTHER; note = 2'-deoxyadenosine-3'-phosphate ((2S,4R)-1-[29-[[2-(acetylamino)-2-deoxy-beta-D-galactopyra nosyl]oxy]-14,14-bis[[3-[[3-[[5-[[2-(acetylamino)-2-deoxy-b eta-D-galactopyranosyl]oxy]-1-oxopentyl]amino]propyl]amino] -3-oxopropoxy]methyl]-1,12,19,25-tetraoxo-16-oxa-13,20,24-t riazanonacos-1-yl]-4-hydroxy-2-pyrrolidinyl)methyl ester
  misc_feature 1..19: note = RNA
  misc_feature 20: note = DNA
gttaacaccatttacttcaa

SEQ ID NO: 45 - DNA, 20 bp, synthetic construct
  source 1..20: mol_type = other DNA
  modified_base 1: mod_base = OTHER; note = 2'-O-methylguanosine-3'-phosphorothioate
  modified_base 2: mod_base = OTHER; note = 2'-O,4'-C-methylmethylene 5-methyluridine-3'-phosphorothioate
  modified_base 3: mod_base = OTHER; note = 2'-O-methyluridine-3'-phosphorothioate
  modified_base 4: mod_base = OTHER; note = 2'-O-methyladenosine-3'-phosphorothioate
  modified_base 5: mod_base = OTHER; note = 2'-O-methyladenosine-3'-phosphorothioate
  modified_base 6: mod_base = OTHER; note = 2'-O,4'-C-methylmethylene 5-methylcytidine-3'-phosphorothioate
  modified_base 7: mod_base = OTHER; note = 2'-O-methyladenosine-3'-phosphorothioate
  modified_base 8: mod_base = OTHER; note = 2'-O-methylcytidine-3'-phosphorothioate
  modified_base 9: mod_base = OTHER; note = 2'-O-methylcytidine-3'-phosphorothioate
  modified_base 10: mod_base = OTHER; note = 2'-O-methyladenosine-3'-phosphorothioate
  modified_base 11: mod_base = OTHER; note = 2'-O,4'-C-methylmethylene 5-methyluridine-3'-phosphorothioate
  modified_base 12: mod_base = OTHER; note = 2'-O-methyluridine-3'-phosphorothioate
  modified_base 13: mod_base = OTHER; note = 2'-O-methyluridine-3'-phosphorothioate
  modified_base 14: mod_base = OTHER; note = 2'-O-methyladenosine-3'-phosphorothioate
  modified_base 15: mod_base = OTHER; note = 2'-O-methylcytidine-3'-phosphorothioate
  modified_base 16: mod_base = OTHER; note = 2'-O-methyluridine-3'-phosphorothioate
  modified_base 17: mod_base = OTHER; note = 2'-O-methyluridine-3'-phosphorothioate
  modified_base 18: mod_base = OTHER; note = 2'-O-methylcytidine-3'-phosphorothioate
  modified_base 19: mod_base = OTHER; note = 2'-O-methyladenosine-3'-phosphate
  modified_base 20: mod_base = OTHER; note = 2'-deoxyadenosine-3'-phosphate ((2S,4R)-1-[29-[[2-(acetylamino)-2-deoxy-beta-D-galactopyra nosyl]oxy]-14,14-bis[[3-[[3-[[5-[[2-(acetylamino)-2-deoxy-b eta-D-galactopyranosyl]oxy]-1-oxopentyl]amino]propyl]amino] -3-oxopropoxy]methyl]-1,12,19,25-tetraoxo-16-oxa-13,20,24-t riazanonacos-1-yl]-4-hydroxy-2-pyrrolidinyl)methyl ester
  misc_feature 1..19: note = RNA
  misc_feature 20: note = DNA
gttaacaccatttacttcaa

SEQ ID NO: 46 - DNA, 20 bp, synthetic construct
  source 1..20: mol_type = other DNA
  modified_base 1: mod_base = OTHER; note = 2'-O-methylguanosine-3'-phosphorothioate
  modified_base 2: mod_base = OTHER; note = 2'-O,4'-C-methylmethylene 5-methyluridine-3'-phosphorothioate
  modified_base 3: mod_base = OTHER; note = 2'-O,4'-C-methylmethylene 5-methyluridine-3'-phosphorothioate
  modified_base 4: mod_base = OTHER; note = 2'-O-methyladenosine-3'-phosphorothioate
  modified_base 5: mod_base = OTHER; note = 2'-O-methyladenosine-3'-phosphorothioate
  modified_base 6: mod_base = OTHER; note = 2'-O-methylcytidine-3'-phosphorothioate
  modified_base 7: mod_base = OTHER; note = 2'-O-methyladenosine-3'-phosphorothioate
  modified_base 8: mod_base = OTHER; note = 2'-O-methylcytidine-3'-phosphorothioate
  modified_base 9: mod_base = OTHER; note = 2'-O-methylcytidine-3'-phosphorothioate
  modified_base 10: mod_base = OTHER; note = 2'-O-methyladenosine-3'-phosphorothioate
  modified_base 11: mod_base = OTHER; note = 2'-O,4'-C-methylmethylene 5-methyluridine-3'-phosphorothioate
  modified_base 12: mod_base = OTHER; note = 2'-O-methyluridine-3'-phosphorothioate
  modified_base 13: mod_base = OTHER; note = 2'-O-methyluridine-3'-phosphorothioate
  modified_base 14: mod_base = OTHER; note = 2'-O-methyladenosine-3'-phosphorothioate
  modified_base 15: mod_base = OTHER; note = 2'-O-methylcytidine-3'-phosphorothioate
  modified_base 16: mod_base = OTHER; note = 2'-O-methyluridine-3'-phosphorothioate
  modified_base 17: mod_base = OTHER; note = 2'-O-methyluridine-3'-phosphorothioate
  modified_base 18: mod_base = OTHER; note = 2'-O-methylcytidine-3'-phosphorothioate
  modified_base 19: mod_base = OTHER; note = 2'-O-methyladenosine-3'-phosphate
  modified_base 20: mod_base = OTHER; note = 2'-deoxyadenosine-3'-phosphate ((2S,4R)-1-[29-[[2-(acetylamino)-2-deoxy-beta-D-galactopyra nosyl]oxy]-14,14-bis[[3-[[3-[[5-[[2-(acetylamino)-2-deoxy-b eta-D-galactopyranosyl]oxy]-1-oxopentyl]amino]propyl]amino] -3-oxopropoxy]methyl]-1,12,19,25-tetraoxo-16-oxa-13,20,24-t riazanonacos-1-yl]-4-hydroxy-2-pyrrolidinyl)methyl ester
  misc_feature 1..19: note = RNA
  misc_feature 20: note = DNA
gttaacaccatttacttcaa

SEQ ID NO: 47 - DNA, 20 bp, synthetic construct
  source 1..20: mol_type = other DNA
  modified_base 1: mod_base = OTHER; note = 2'-O-methylguanosine-3'-phosphorothioate
  modified_base 2: mod_base = OTHER; note = 2'-O,4'-C-methylmethylene 5-methyluridine-3'-phosphorothioate
  modified_base 3: mod_base = OTHER; note = 2'-O,4'-C-methylmethylene 5-methyluridine-3'-phosphorothioate
  modified_base 4: mod_base = OTHER; note = 2'-O-methyladenosine-3'-phosphorothioate
  modified_base 5: mod_base = OTHER; note = 2'-O-methyladenosine-3'-phosphorothioate
  modified_base 6: mod_base = OTHER; note = 2'-O,4'-C-methylmethylene 5-methylcytidine-3'-phosphorothioate
  modified_base 7: mod_base = OTHER; note = 2'-O-methyladenosine-3'-phosphorothioate
  modified_base 8: mod_base = OTHER; note = 2'-O-methylcytidine-3'-phosphorothioate
  modified_base 9: mod_base = OTHER; note = 2'-O-methylcytidine-3'-phosphorothioate
  modified_base 10: mod_base = OTHER; note = 2'-O-methyladenosine-3'-phosphorothioate
  modified_base 11: mod_base = OTHER; note = 2'-O-methyluridine-3'-phosphorothioate
  modified_base 12: mod_base = OTHER; note = 2'-O-methyluridine-3'-phosphorothioate
  modified_base 13: mod_base = OTHER; note = 2'-O-methyluridine-3'-phosphorothioate
  modified_base 14: mod_base = OTHER; note = 2'-O-methyladenosine-3'-phosphorothioate
  modified_base 15: mod_base = OTHER; note = 2'-O-methylcytidine-3'-phosphorothioate
  modified_base 16: mod_base = OTHER; note = 2'-O-methyluridine-3'-phosphorothioate
  modified_base 17: mod_base = OTHER; note = 2'-O-methyluridine-3'-phosphorothioate
  modified_base 18: mod_base = OTHER; note = 2'-O-methylcytidine-3'-phosphorothioate
  modified_base 19: mod_base = OTHER; note = 2'-O-methyladenosine-3'-phosphate
  modified_base 20: mod_base = OTHER; note = 2'-deoxyadenosine-3'-phosphate ((2S,4R)-1-[29-[[2-(acetylamino)-2-deoxy-beta-D-galactopyra nosyl]oxy]-14,14-bis[[3-[[3-[[5-[[2-(acetylamino)-2-deoxy-b eta-D-galactopyranosyl]oxy]-1-oxopentyl]amino]propyl]amino] -3-oxopropoxy]methyl]-1,12,19,25-tetraoxo-16-oxa-13,20,24-t riazanonacos-1-yl]-4-hydroxy-2-pyrrolidinyl)methyl ester
  misc_feature 1..19: note = RNA
  misc_feature 20: note = DNA
gttaacaccatttacttcaa

SEQ ID NO: 48 - DNA, 20 bp, synthetic construct
  source 1..20: mol_type = other DNA
  modified_base 1: mod_base = OTHER; note = 2'-O-methylguanosine-3'-phosphorothioate
  modified_base 2: mod_base = OTHER; note = 2'-O,4'-C-methylmethylene 5-methyluridine-3'-phosphorothioate
  modified_base 3: mod_base = OTHER; note = 2'-O-methyluridine-3'-phosphorothioate
  modified_base 4: mod_base = OTHER; note = 2'-O-methyladenosine-3'-phosphate
  modified_base 5: mod_base = OTHER; note = 2'-O-methyladenosine-3'-phosphate
  modified_base 6: mod_base = OTHER; note = 2'-O-methylcytidine-3'-phosphate
  modified_base 7: mod_base = OTHER; note = 2'-O-methyladenosine-3'-phosphate
  modified_base 8: mod_base = OTHER; note = 2'-O,4'-C-methylmethylene 5-methylcytidine-3'-phosphate
  modified_base 9: mod_base = OTHER; note = 2'-O-methylcytidine-3'-phosphate
  modified_base 10: mod_base = OTHER; note = 2'-O-methyladenosine-3'-phosphorothioate
  modified_base 11: mod_base = OTHER; note = 2'-O-methyluridine-3'-phosphorothioate
  modified_base 12: mod_base = OTHER; note = 2'-O-methyluridine-3'-phosphate
  modified_base 13: mod_base = OTHER; note = 2'-O-methyluridine-3'-phosphorothioate
  modified_base 14: mod_base = OTHER; note = 2'-O-methyladenosine-3'-phosphate
  modified_base 15: mod_base = OTHER; note = 2'-O,4'-C-methylmethylene 5-methylcytidine-3'-phosphate
  modified_base 16: mod_base = OTHER; note = 2'-O-methyluridine-3'-phosphorothioate
  modified_base 17: mod_base = OTHER; note = 2'-O,4'-C-methylmethylene 5-methyluridine-3'-phosphate
  modified_base 18: mod_base = OTHER; note = 2'-O,4'-C-methylmethylene 5-methylcytidine-3'-phosphorothioate
  modified_base 19: mod_base = OTHER; note = 2'-O-methyladenosine-3'-phosphate
  modified_base 20: mod_base = OTHER; note = 2'-deoxyadenosine-3'-phosphate ((2S,4R)-1-[29-[[2-(acetylamino)-2-deoxy-beta-D-galactopyra nosyl]oxy]-14,14-bis[[3-[[3-[[5-[[2-(acetylamino)-2-deoxy-b eta-D-galactopyranosyl]oxy]-1-oxopentyl]amino]propyl]amino] -3-oxopropoxy]methyl]-1,12,19,25-tetraoxo-16-oxa-13,20,24-t riazanonacos-1-yl]-4-hydroxy-2-pyrrolidinyl)methyl ester
  misc_feature 1..19: note = RNA
  misc_feature 20: note = DNA
gttaacaccatttacttcaa

SEQ ID NO: 49 - DNA, 20 bp, synthetic construct
  source 1..20: mol_type = other DNA
  modified_base 1: mod_base = OTHER; note = 2'-O-methylguanosine-3'-phosphorothioate
  modified_base 2: mod_base = OTHER; note = 2'-O,4'-C-methylmethylene 5-methyluridine-3'-phosphate
  modified_base 3: mod_base = OTHER; note = 2'-O-methyluridine-3'-phosphorothioate
  modified_base 4: mod_base = OTHER; note = 2'-O-methyladenosine-3'-phosphate
  modified_base 5: mod_base = OTHER; note = 2'-O-methyladenosine-3'-phosphate
  modified_base 6: mod_base = OTHER; note = 2'-O-methylcytidine-3'-phosphate
  modified_base 7: mod_base = OTHER; note = 2'-O-methyladenosine-3'-phosphate
  modified_base 8: mod_base = OTHER; note = 2'-O,4'-C-methylmethylene 5-methylcytidine-3'-phosphate
  modified_base 9: mod_base = OTHER; note = 2'-O-methylcytidine-3'-phosphate
  modified_base 10: mod_base = OTHER; note = 2'-O-methyladenosine-3'-phosphorothioate
  modified_base 11: mod_base = OTHER; note = 2'-O-methyluridine-3'-phosphate
  modified_base 12: mod_base = OTHER; note = 2'-O-methyluridine-3'-phosphate
  modified_base 13: mod_base = OTHER; note = 2'-O-methyluridine-3'-phosphate
  modified_base 14: mod_base = OTHER; note = 2'-O-methyladenosine-3'-phosphate
  modified_base 15: mod_base = OTHER; note = 2'-O,4'-C-methylmethylene 5-methylcytidine-3'-phosphate
  modified_base 16: mod_base = OTHER; note = 2'-O-methyluridine-3'-phosphorothioate
  modified_base 17: mod_base = OTHER; note = 2'-O,4'-C-methylmethylene 5-methyluridine-3'-phosphate
  modified_base 18: mod_base = OTHER; note = 2'-O,4'-C-methylmethylene 5-methylcytidine-3'-phosphate
  modified_base 19: mod_base = OTHER; note = 2'-O-methyladenosine-3'-phosphate
  modified_base 20: mod_base = OTHER; note = 2'-deoxyadenosine-3'-phosphate ((2S,4R)-1-[29-[[2-(acetylamino)-2-deoxy-beta-D-galactopyra nosyl]oxy]-14,14-bis[[3-[[3-[[5-[[2-(acetylamino)-2-deoxy-b eta-D-galactopyranosyl]oxy]-1-oxopentyl]amino]propyl]amino] -3-oxopropoxy]methyl]-1,12,19,25-tetraoxo-16-oxa-13,20,24-t riazanonacos-1-yl]-4-hydroxy-2-pyrrolidinyl)methyl ester
  misc_feature 1..19: note = RNA
  misc_feature 20: note = DNA
gttaacaccatttacttcaa

SEQ ID NO: 50 - DNA, 20 bp, synthetic construct
  source 1..20: mol_type = other DNA
  modified_base 1: mod_base = OTHER; note = 2'-O-methylguanosine-3'-phosphorothioate
  modified_base 2: mod_base = OTHER; note = 2'-O,4'-C-methylmethylene 5-methyluridine-3'-phosphorothioate
  modified_base 3: mod_base = OTHER; note = 2'-O-methyluridine-3'-phosphate
  modified_base 4: mod_base = OTHER; note = 2'-O-methyladenosine-3'-phosphate
  modified_base 5: mod_base = OTHER; note = 2'-O-methyladenosine-3'-phosphate
  modified_base 6: mod_base = OTHER; note = 2'-O-methylcytidine-3'-phosphate
  modified_base 7: mod_base = OTHER; note = 2'-O-methyladenosine-3'-phosphate
  modified_base 8: mod_base = OTHER; note = 2'-O,4'-C-methylmethylene 5-methylcytidine-3'-phosphate
  modified_base 9: mod_base = OTHER; note = 2'-O-methylcytidine-3'-phosphate
  modified_base 10: mod_base = OTHER; note = 2'-O-methyladenosine-3'-phosphate
  modified_base 11: mod_base = OTHER; note = 2'-O-methyluridine-3'-phosphate
  modified_base 12: mod_base = OTHER; note = 2'-O-methyluridine-3'-phosphate
  modified_base 13: mod_base = OTHER; note = 2'-O-methyluridine-3'-phosphate
  modified_base 14: mod_base = OTHER; note = 2'-O-methyladenosine-3'-phosphate
  modified_base 15: mod_base = OTHER; note = 2'-O,4'-C-methylmethylene 5-methylcytidine-3'-phosphate
  modified_base 16: mod_base = OTHER; note = 2'-O-methyluridine-3'-phosphate
  modified_base 17: mod_base = OTHER; note = 2'-O,4'-C-methylmethylene 5-methyluridine-3'-phosphorothioate
  modified_base 18: mod_base = OTHER; note = 2'-O,4'-C-methylmethylene 5-methylcytidine-3'-phosphorothioate
  modified_base 19: mod_base = OTHER; note = 2'-O-methyladenosine-3'-phosphate
  modified_base 20: mod_base = OTHER; note = 2'-deoxyadenosine-3'-phosphate ((2S,4R)-1-[29-[[2-(acetylamino)-2-deoxy-beta-D-galactopyra nosyl]oxy]-14,14-bis[[3-[[3-[[5-[[2-(acetylamino)-2-deoxy-b eta-D-galactopyranosyl]oxy]-1-oxopentyl]amino]propyl]amino] -3-oxopropoxy]methyl]-1,12,19,25-tetraoxo-16-oxa-13,20,24-t riazanonacos-1-yl]-4-hydroxy-2-pyrrolidinyl)methyl ester
  misc_feature 1..19: note = RNA
  misc_feature 20: note = DNA
gttaacaccatttacttcaa

SEQ ID NO: 51 - DNA, 20 bp, synthetic construct
  source 1..20: mol_type = other DNA
  modified_base 1: mod_base = OTHER; note = 2'-O-methylguanosine-3'-phosphorothioate
  modified_base 2: mod_base = OTHER; note = 2'-O,4'-C-methylmethylene 5-methyluridine-3'-phosphate
  modified_base 3: mod_base = OTHER; note = 2'-O-methyluridine-3'-phosphate
  modified_base 4: mod_base = OTHER; note = 2'-O-methyladenosine-3'-phosphate
  modified_base 5: mod_base = OTHER; note = 2'-O-methyladenosine-3'-phosphate
  modified_base 6: mod_base = OTHER; note = 2'-O-methylcytidine-3'-phosphate
  modified_base 7: mod_base = OTHER; note = 2'-O-methyladenosine-3'-phosphate
  modified_base 8: mod_base = OTHER; note = 2'-O,4'-C-methylmethylene 5-methylcytidine-3'-phosphate
  modified_base 9: mod_base = OTHER; note = 2'-O-methylcytidine-3'-phosphate
  modified_base 10: mod_base = OTHER; note = 2'-O-methyladenosine-3'-phosphate
  modified_base 11: mod_base = OTHER; note = 2'-O-methyluridine-3'-phosphate
  modified_base 12: mod_base = OTHER; note = 2'-O-methyluridine-3'-phosphate
  modified_base 13: mod_base = OTHER; note = 2'-O-methyluridine-3'-phosphate
  modified_base 14: mod_base = OTHER; note = 2'-O-methyladenosine-3'-phosphate
  modified_base 15: mod_base = OTHER; note = 2'-O,4'-C-methylmethylene 5-methylcytidine-3'-phosphate
  modified_base 16: mod_base = OTHER; note = 2'-O-methyluridine-3'-phosphate
  modified_base 17: mod_base = OTHER; note = 2'-O,4'-C-methylmethylene 5-methyluridine-3'-phosphate
  modified_base 18: mod_base = OTHER; note = 2'-O,4'-C-methylmethylene 5-methylcytidine-3'-phosphorothioate
  modified_base 19: mod_base = OTHER; note = 2'-O-methyladenosine-3'-phosphate
  modified_base 20: mod_base = OTHER; note = 2'-deoxyadenosine-3'-phosphate ((2S,4R)-1-[29-[[2-(acetylamino)-2-deoxy-beta-D-galactopyra nosyl]oxy]-14,14-bis[[3-[[3-[[5-[[2-(acetylamino)-2-deoxy-b eta-D-galactopyranosyl]oxy]-1-oxopentyl]amino]propyl]amino] -3-oxopropoxy]methyl]-1,12,19,25-tetraoxo-16-oxa-13,20,24-t riazanonacos-1-yl]-4-hydroxy-2-pyrrolidinyl)methyl ester
  misc_feature 1..19: note = RNA
  misc_feature 20: note = DNA
gttaacaccatttacttcaa

SEQ ID NO: 52 - DNA, 20 bp, synthetic construct
  source 1..20: mol_type = other DNA
  modified_base 1: mod_base = OTHER; note = 2'-O-methylguanosine-3'-phosphorothioate
  modified_base 2: mod_base = OTHER; note = 2'-O,4'-C-methylmethylene 5-methyluridine-3'-phosphorothioate
  modified_base 3: mod_base = OTHER; note = 2'-O-methyluridine-3'-phosphate
  modified_base 4: mod_base = OTHER; note = 2'-O-methyladenosine-3'-phosphate
  modified_base 5: mod_base = OTHER; note = 2'-O-methyladenosine-3'-phosphate
  modified_base 6: mod_base = OTHER; note = 2'-O-methylcytidine-3'-phosphate
  modified_base 7: mod_base = OTHER; note = 2'-O-methyladenosine-3'-phosphate
  modified_base 8: mod_base = OTHER; note = 2'-O-methylcytidine-3'-phosphate
  modified_base 9: mod_base = OTHER; note = 2'-O-methylcytidine-3'-phosphate
  modified_base 10: mod_base = OTHER; note = 2'-O-methyladenosine-3'-phosphate
  modified_base 11: mod_base = OTHER; note = 2'-O-methyluridine-3'-phosphate
  modified_base 12: mod_base = OTHER; note = 2'-O-methyluridine-3'-phosphate
  modified_base 13: mod_base = OTHER; note = 2'-O-methyluridine-3'-phosphate
  modified_base 14: mod_base = OTHER; note = 2'-O-methyladenosine-3'-phosphate
  modified_base 15: mod_base = OTHER; note = 2'-O-methylcytidine-3'-phosphate
  modified_base 16: mod_base = OTHER; note = 2'-O-methyluridine-3'-phosphate
  modified_base 17: mod_base = OTHER; note = 2'-O-methyluridine-3'-phosphorothioate
  modified_base 18: mod_base = OTHER; note = 2'-O-methylcytidine-3'-phosphorothioate
  modified_base 19: mod_base = OTHER; note = 2'-O-methyladenosine-3'-phosphate
  modified_base 20: mod_base = OTHER; note = 2'-deoxyadenosine-3'-phosphate ((2S,4R)-1-[29-[[2-(acetylamino)-2-deoxy-beta-D-galactopyra nosyl]oxy]-14,14-bis[[3-[[3-[[5-[[2-(acetylamino)-2-deoxy-b eta-D-galactopyranosyl]oxy]-1-oxopentyl]amino]propyl]amino] -3-oxopropoxy]methyl]-1,12,19,25-tetraoxo-16-oxa-13,20,24-t riazanonacos-1-yl]-4-hydroxy-2-pyrrolidinyl)methyl ester
  misc_feature 1..19: note = RNA
  misc_feature 20: note = DNA
gttaacaccatttacttcaa

SEQ ID NO: 53 - DNA, 20 bp, synthetic construct
  source 1..20: mol_type = other DNA
  modified_base 1: mod_base = OTHER; note = 2'-O-methylguanosine-3'-phosphorothioate
  modified_base 2: mod_base = OTHER; note = 2'-O-methyluridine-3'-phosphorothioate
  modified_base 3: mod_base = OTHER; note = 2'-O,4'-C-methylmethylene 5-methyluridine-3'-phosphate
  modified_base 4: mod_base = OTHER; note = 2'-O-methyladenosine-3'-phosphate
  modified_base 5: mod_base = OTHER; note = 2'-O-methyladenosine-3'-phosphate
  modified_base 6: mod_base = OTHER; note = 2'-O-methylcytidine-3'-phosphate
  modified_base 7: mod_base = OTHER; note = 2'-O-methyladenosine-3'-phosphate
  modified_base 8: mod_base = OTHER; note = 2'-O-methylcytidine-3'-phosphate
  modified_base 9: mod_base = OTHER; note = 2'-O-methylcytidine-3'-phosphate
  modified_base 10: mod_base = OTHER; note = 2'-O-methyladenosine-3'-phosphate
  modified_base 11: mod_base = OTHER; note = 2'-O-methyluridine-3'-phosphate
  modified_base 12: mod_base = OTHER; note = 2'-O-methyluridine-3'-phosphate
  modified_base 13: mod_base = OTHER; note = 2'-O-methyluridine-3'-phosphate
  modified_base 14: mod_base = OTHER; note = 2'-O-methyladenosine-3'-phosphate
  modified_base 15: mod_base = OTHER; note = 2'-O-methylcytidine-3'-phosphate
  modified_base 16: mod_base = OTHER; note = 2'-O-methyluridine-3'-phosphate
  modified_base 17: mod_base = OTHER; note = 2'-O-methyluridine-3'-phosphorothioate
  modified_base 18: mod_base = OTHER; note = 2'-O-methylcytidine-3'-phosphorothioate
  modified_base 19: mod_base = OTHER; note = 2'-O-methyladenosine-3'-phosphate
  modified_base 20: mod_base = OTHER; note = 2'-deoxyadenosine-3'-phosphate ((2S,4R)-1-[29-[[2-(acetylamino)-2-deoxy-beta-D-galactopyra nosyl]oxy]-14,14-bis[[3-[[3-[[5-[[2-(acetylamino)-2-deoxy-b eta-D-galactopyranosyl]oxy]-1-oxopentyl]amino]propyl]amino] -3-oxopropoxy]methyl]-1,12,19,25-tetraoxo-16-oxa-13,20,24-t riazanonacos-1-yl]-4-hydroxy-2-pyrrolidinyl)methyl ester
  misc_feature 1..19: note = RNA
  misc_feature 20: note = DNA
gttaacaccatttacttcaa

SEQ ID NO: 54 - DNA, 20 bp, synthetic construct
  source 1..20: mol_type = other DNA
  modified_base 1: mod_base = OTHER; note = 2'-O-methylguanosine-3'-phosphorothioate
  modified_base 2: mod_base = OTHER; note = 2'-O-methyluridine-3'-phosphorothioate
  modified_base 3: mod_base = OTHER; note = 2'-O-methyluridine-3'-phosphate
  modified_base 4: mod_base = OTHER; note = 2'-O-methyladenosine-3'-phosphate
  modified_base 5: mod_base = OTHER; note = 2'-O-methyladenosine-3'-phosphate
  modified_base 6: mod_base = OTHER; note = 2'-O,4'-C-methylmethylene 5-methylcytidine-3'-phosphate
  modified_base 7: mod_base = OTHER; note = 2'-O-methyladenosine-3'-phosphate
  modified_base 8: mod_base = OTHER; note = 2'-O-methylcytidine-3'-phosphate
  modified_base 9: mod_base = OTHER; note = 2'-O-methylcytidine-3'-phosphate
  modified_base 10: mod_base = OTHER; note = 2'-O-methyladenosine-3'-phosphate
  modified_base 11: mod_base = OTHER; note = 2'-O-methyluridine-3'-phosphate
  modified_base 12: mod_base = OTHER; note = 2'-O-methyluridine-3'-phosphate
  modified_base 13: mod_base = OTHER; note = 2'-O-methyluridine-3'-phosphate
  modified_base 14: mod_base = OTHER; note = 2'-O-methyladenosine-3'-phosphate
  modified_base 15: mod_base = OTHER; note = 2'-O-methylcytidine-3'-phosphate
  modified_base 16: mod_base = OTHER; note = 2'-O-methyluridine-3'-phosphate
  modified_base 17: mod_base = OTHER; note = 2'-O-methyluridine-3'-phosphorothioate
  modified_base 18: mod_base = OTHER; note = 2'-O-methylcytidine-3'-phosphorothioate
  modified_base 19: mod_base = OTHER; note = 2'-O-methyladenosine-3'-phosphate
  modified_base 20: mod_base = OTHER; note = 2'-deoxyadenosine-3'-phosphate ((2S,4R)-1-[29-[[2-(acetylamino)-2-deoxy-beta-D-galactopyra nosyl]oxy]-14,14-bis[[3-[[3-[[5-[[2-(acetylamino)-2-deoxy-b eta-D-galactopyranosyl]oxy]-1-oxopentyl]amino]propyl]amino] -3-oxopropoxy]methyl]-1,12,19,25-tetraoxo-16-oxa-13,20,24-t riazanonacos-1-yl]-4-hydroxy-2-pyrrolidinyl)methyl ester
  misc_feature 1..19: note = RNA
  misc_feature 20: note = DNA
gttaacaccatttacttcaa

SEQ ID NO: 55 - DNA, 20 bp, synthetic construct
  source 1..20: mol_type = other DNA
  modified_base 1: mod_base = OTHER; note = 2'-O-methylguanosine-3'-phosphorothioate
  modified_base 2: mod_base = OTHER; note = 2'-O-methyluridine-3'-phosphorothioate
  modified_base 3: mod_base = OTHER; note = 2'-O-methyluridine-3'-phosphate
  modified_base 4: mod_base = OTHER; note = 2'-O-methyladenosine-3'-phosphate
  modified_base 5: mod_base = OTHER; note = 2'-O-methyladenosine-3'-phosphate
  modified_base 6: mod_base = OTHER; note = 2'-O-methylcytidine-3'-phosphate
  modified_base 7: mod_base = OTHER; note = 2'-O-methyladenosine-3'-phosphate
  modified_base 8: mod_base = OTHER; note = 2'-O,4'-C-methylmethylene 5-methylcytidine-3'-phosphate
  modified_base 9: mod_base = OTHER; note = 2'-O-methylcytidine-3'-phosphate
  modified_base 10: mod_base = OTHER; note = 2'-O-methyladenosine-3'-phosphate
  modified_base 11: mod_base = OTHER; note = 2'-O-methyluridine-3'-phosphate
  modified_base 12: mod_base = OTHER; note = 2'-O-methyluridine-3'-phosphate
  modified_base 13: mod_base = OTHER; note = 2'-O-methyluridine-3'-phosphate
  modified_base 14: mod_base = OTHER; note = 2'-O-methyladenosine-3'-phosphate
  modified_base 15: mod_base = OTHER; note = 2'-O-methylcytidine-3'-phosphate
  modified_base 16: mod_base = OTHER; note = 2'-O-methyluridine-3'-phosphate
  modified_base 17: mod_base = OTHER; note = 2'-O-methyluridine-3'-phosphorothioate
  modified_base 18: mod_base = OTHER; note = 2'-O-methylcytidine-3'-phosphorothioate
  modified_base 19: mod_base = OTHER; note = 2'-O-methyladenosine-3'-phosphate
  modified_base 20: mod_base = OTHER; note = 2'-deoxyadenosine-3'-phosphate ((2S,4R)-1-[29-[[2-(acetylamino)-2-deoxy-beta-D-galactopyra nosyl]oxy]-14,14-bis[[3-[[3-[[5-[[2-(acetylamino)-2-deoxy-b eta-D-galactopyranosyl]oxy]-1-oxopentyl]amino]propyl]amino] -3-oxopropoxy]methyl]-1,12,19,25-tetraoxo-16-oxa-13,20,24-t riazanonacos-1-yl]-4-hydroxy-2-pyrrolidinyl)methyl ester
  misc_feature 1..19: note = RNA
  misc_feature 20: note = DNA
gttaacaccatttacttcaa

SEQ ID NO: 56 - DNA, 20 bp, synthetic construct
  source 1..20: mol_type = other DNA
  modified_base 1: mod_base = OTHER; note = 2'-O-methylguanosine-3'-phosphorothioate
  modified_base 2: mod_base = OTHER; note = 2'-O-methyluridine-3'-phosphorothioate
  modified_base 3: mod_base = OTHER; note = 2'-O-methyluridine-3'-phosphate
  modified_base 4: mod_base = OTHER; note = 2'-O-methyladenosine-3'-phosphate
  modified_base 5: mod_base = OTHER; note = 2'-O-methyladenosine-3'-phosphate
  modified_base 6: mod_base = OTHER; note = 2'-O-methylcytidine-3'-phosphate
  modified_base 7: mod_base = OTHER; note = 2'-O-methyladenosine-3'-phosphate
  modified_base 8: mod_base = OTHER; note = 2'-O-methylcytidine-3'-phosphate
  modified_base 9: mod_base = OTHER; note = 2'-O,4'-C-methylmethylene 5-methylcytidine-3'-phosphate
  modified_base 10: mod_base = OTHER; note = 2'-O-methyladenosine-3'-phosphate
  modified_base 11: mod_base = OTHER; note = 2'-O-methyluridine-3'-phosphate
  modified_base 12: mod_base = OTHER; note = 2'-O-methyluridine-3'-phosphate
  modified_base 13: mod_base = OTHER; note = 2'-O-methyluridine-3'-phosphate
  modified_base 14: mod_base = OTHER; note = 2'-O-methyladenosine-3'-phosphate
  modified_base 15: mod_base = OTHER; note = 2'-O-methylcytidine-3'-phosphate
  modified_base 16: mod_base = OTHER; note = 2'-O-methyluridine-3'-phosphate
  modified_base 17: mod_base = OTHER; note = 2'-O-methyluridine-3'-phosphorothioate
  modified_base 18: mod_base = OTHER; note = 2'-O-methylcytidine-3'-phosphorothioate
  modified_base 19: mod_base = OTHER; note = 2'-O-methyladenosine-3'-phosphate
  modified_base 20: mod_base = OTHER; note = 2'-deoxyadenosine-3'-phosphate ((2S,4R)-1-[29-[[2-(acetylamino)-2-deoxy-beta-D-galactopyra nosyl]oxy]-14,14-bis[[3-[[3-[[5-[[2-(acetylamino)-2-deoxy-b eta-D-galactopyranosyl]oxy]-1-oxopentyl]amino]propyl]amino] -3-oxopropoxy]methyl]-1,12,19,25-tetraoxo-16-oxa-13,20,24-t riazanonacos-1-yl]-4-hydroxy-2-pyrrolidinyl)methyl ester
  misc_feature 1..19: note = RNA
  misc_feature 20: note = DNA
gttaacaccatttacttcaa

SEQ ID NO: 57 - DNA, 20 bp, synthetic construct
  source 1..20: mol_type = other DNA
  modified_base 1: mod_base = OTHER; note = 2'-O-methylguanosine-3'-phosphorothioate
  modified_base 2: mod_base = OTHER; note = 2'-O-methyluridine-3'-phosphorothioate
  modified_base 3: mod_base = OTHER; note = 2'-O-methyluridine-3'-phosphate
  modified_base 4: mod_base = OTHER; note = 2'-O-methyladenosine-3'-phosphate
  modified_base 5: mod_base = OTHER; note = 2'-O-methyladenosine-3'-phosphate
  modified_base 6: mod_base = OTHER; note = 2'-O-methylcytidine-3'-phosphate
  modified_base 7: mod_base = OTHER; note = 2'-O-methyladenosine-3'-phosphate
  modified_base 8: mod_base = OTHER; note = 2'-O-methylcytidine-3'-phosphate
  modified_base 9: mod_base = OTHER; note = 2'-O-methylcytidine-3'-phosphate
  modified_base 10: mod_base = OTHER; note = 2'-O-methyladenosine-3'-phosphate
  modified_base 11: mod_base = OTHER; note = 2'-O,4'-C-methylmethylene 5-methyluridine-3'-phosphate
  modified_base 12: mod_base = OTHER; note = 2'-O-methyluridine-3'-phosphate
  modified_base 13: mod_base = OTHER; note = 2'-O-methyluridine-3'-phosphate
  modified_base 14: mod_base = OTHER; note = 2'-O-methyladenosine-3'-phosphate
  modified_base 15: mod_base = OTHER; note = 2'-O-methylcytidine-3'-phosphate
  modified_base 16: mod_base = OTHER; note = 2'-O-methyluridine-3'-phosphate
  modified_base 17: mod_base = OTHER; note = 2'-O-methyluridine-3'-phosphorothioate
  modified_base 18: mod_base = OTHER; note = 2'-O-methylcytidine-3'-phosphorothioate
  modified_base 19: mod_base = OTHER; note = 2'-O-methyladenosine-3'-phosphate
  modified_base 20: mod_base = OTHER; note = 2'-deoxyadenosine-3'-phosphate ((2S,4R)-1-[29-[[2-(acetylamino)-2-deoxy-beta-D-galactopyra nosyl]oxy]-14,14-bis[[3-[[3-[[5-[[2-(acetylamino)-2-deoxy-b eta-D-galactopyranosyl]oxy]-1-oxopentyl]amino]propyl]amino] -3-oxopropoxy]methyl]-1,12,19,25-tetraoxo-16-oxa-13,20,24-t riazanonacos-1-yl]-4-hydroxy-2-pyrrolidinyl)methyl ester
  misc_feature 1..19: note = RNA
  misc_feature 20: note = DNA
gttaacaccatttacttcaa

SEQ ID NO: 58 - DNA, 20 bp, synthetic construct
  source 1..20: mol_type = other DNA
  modified_base 1: mod_base = OTHER; note = 2'-O-methylguanosine-3'-phosphorothioate
  modified_base 2: mod_base = OTHER; note = 2'-O-methyluridine-3'-phosphorothioate
  modified_base 3: mod_base = OTHER; note = 2'-O-methyluridine-3'-phosphate
  modified_base 4: mod_base = OTHER; note = 2'-O-methyladenosine-3'-phosphate
  modified_base 5: mod_base = OTHER; note = 2'-O-methyladenosine-3'-phosphate
  modified_base 6: mod_base = OTHER; note = 2'-O-methylcytidine-3'-phosphate
  modified_base 7: mod_base = OTHER; note = 2'-O-methyladenosine-3'-phosphate
  modified_base 8: mod_base = OTHER; note = 2'-O-methylcytidine-3'-phosphate
  modified_base 9: mod_base = OTHER; note = 2'-O-methylcytidine-3'-phosphate
  modified_base 10: mod_base = OTHER; note = 2'-O-methyladenosine-3'-phosphate
  modified_base 11: mod_base = OTHER; note = 2'-O-methyluridine-3'-phosphate
  modified_base 12: mod_base = OTHER; note = 2'-O,4'-C-methylmethylene 5-methyluridine-3'-phosphate
  modified_base 13: mod_base = OTHER; note = 2'-O-methyluridine-3'-phosphate
  modified_base 14: mod_base = OTHER; note = 2'-O-methyladenosine-3'-phosphate
  modified_base 15: mod_base = OTHER; note = 2'-O-methylcytidine-3'-phosphate
  modified_base 16: mod_base = OTHER; note = 2'-O-methyluridine-3'-phosphate
  modified_base 17: mod_base = OTHER; note = 2'-O-methyluridine-3'-phosphorothioate
  modified_base 18: mod_base = OTHER; note = 2'-O-methylcytidine-3'-phosphorothioate
  modified_base 19: mod_base = OTHER; note = 2'-O-methyladenosine-3'-phosphate
  modified_base 20: mod_base = OTHER; note = 2'-deoxyadenosine-3'-phosphate ((2S,4R)-1-[29-[[2-(acetylamino)-2-deoxy-beta-D-galactopyra nosyl]oxy]-14,14-bis[[3-[[3-[[5-[[2-(acetylamino)-2-deoxy-b eta-D-galactopyranosyl]oxy]-1-oxopentyl]amino]propyl]amino] -3-oxopropoxy]methyl]-1,12,19,25-tetraoxo-16-oxa-13,20,24-t riazanonacos-1-yl]-4-hydroxy-2-pyrrolidinyl)methyl ester
  misc_feature 1..19: note = RNA
  misc_feature 20: note = DNA
gttaacaccatttacttcaa

SEQ ID NO: 59 - DNA, 20 bp, synthetic construct
  source 1..20: mol_type = other DNA
  modified_base 1: mod_base = OTHER; note = 2'-O-methylguanosine-3'-phosphorothioate
  modified_base 2: mod_base = OTHER; note = 2'-O-methyluridine-3'-phosphorothioate
  modified_base 3: mod_base = OTHER; note = 2'-O-methyluridine-3'-phosphate
  modified_base 4: mod_base = OTHER; note = 2'-O-methyladenosine-3'-phosphate
  modified_base 5: mod_base = OTHER; note = 2'-O-methyladenosine-3'-phosphate
  modified_base 6: mod_base = OTHER; note = 2'-O-methylcytidine-3'-phosphate
  modified_base 7: mod_base = OTHER; note = 2'-O-methyladenosine-3'-phosphate
  modified_base 8: mod_base = OTHER; note = 2'-O-methylcytidine-3'-phosphate
  modified_base 9: mod_base = OTHER; note = 2'-O-methylcytidine-3'-phosphate
  modified_base 10: mod_base = OTHER; note = 2'-O-methyladenosine-3'-phosphate
  modified_base 11: mod_base = OTHER; note = 2'-O-methyluridine-3'-phosphate
  modified_base 12: mod_base = OTHER; note = 2'-O-methyluridine-3'-phosphate
  modified_base 13: mod_base = OTHER; note = 2'-O,4'-C-methylmethylene 5-methyluridine-3'-phosphate
  modified_base 14: mod_base = OTHER; note = 2'-O-methyladenosine-3'-phosphate
  modified_base 15: mod_base = OTHER; note = 2'-O-methylcytidine-3'-phosphate
  modified_base 16: mod_base = OTHER; note = 2'-O-methyluridine-3'-phosphate
  modified_base 17: mod_base = OTHER; note = 2'-O-methyluridine-3'-phosphorothioate
  modified_base 18: mod_base = OTHER; note = 2'-O-methylcytidine-3'-phosphorothioate
  modified_base 19: mod_base = OTHER; note = 2'-O-methyladenosine-3'-phosphate
  modified_base 20: mod_base = OTHER; note = 2'-deoxyadenosine-3'-phosphate ((2S,4R)-1-[29-[[2-(acetylamino)-2-deoxy-beta-D-galactopyra nosyl]oxy]-14,14-bis[[3-[[3-[[5-[[2-(acetylamino)-2-deoxy-b eta-D-galactopyranosyl]oxy]-1-oxopentyl]amino]propyl]amino] -3-oxopropoxy]methyl]-1,12,19,25-tetraoxo-16-oxa-13,20,24-t riazanonacos-1-yl]-4-hydroxy-2-pyrrolidinyl)methyl ester
  misc_feature 1..19: note = RNA
  misc_feature 20: note = DNA
gttaacaccatttacttcaa

SEQ ID NO: 60 - DNA, 20 bp, synthetic construct
  source 1..20: mol_type = other DNA
  modified_base 1: mod_base = OTHER; note = 2'-O-methylguanosine-3'-phosphorothioate
  modified_base 2: mod_base = OTHER; note = 2'-O-methyluridine-3'-phosphorothioate
  modified_base 3: mod_base = OTHER; note = 2'-O-methyluridine-3'-phosphate
  modified_base 4: mod_base = OTHER; note = 2'-O-methyladenosine-3'-phosphate
  modified_base 5: mod_base = OTHER; note = 2'-O-methyladenosine-3'-phosphate
  modified_base 6: mod_base = OTHER; note = 2'-O-methylcytidine-3'-phosphate
  modified_base 7: mod_base = OTHER; note = 2'-O-methyladenosine-3'-phosphate
  modified_base 8: mod_base = OTHER; note = 2'-O-methylcytidine-3'-phosphate
  modified_base 9: mod_base = OTHER; note = 2'-O-methylcytidine-3'-phosphate
  modified_base 10: mod_base = OTHER; note = 2'-O-methyladenosine-3'-phosphate
  modified_base 11: mod_base = OTHER; note = 2'-O-methyluridine-3'-phosphate
  modified_base 12: mod_base = OTHER; note = 2'-O-methyluridine-3'-phosphate
  modified_base 13: mod_base = OTHER; note = 2'-O-methyluridine-3'-phosphate
  modified_base 14: mod_base = OTHER; note = 2'-O-methyladenosine-3'-phosphate
  modified_base 15: mod_base = OTHER; note = 2'-O,4'-C-methylmethylene 5-methylcytidine-3'-phosphate
  modified_base 16: mod_base = OTHER; note = 2'-O-methyluridine-3'-phosphate
  modified_base 17: mod_base = OTHER; note = 2'-O-methyluridine-3'-phosphorothioate
  modified_base 18: mod_base = OTHER; note = 2'-O-methylcytidine-3'-phosphorothioate
  modified_base 19: mod_base = OTHER; note = 2'-O-methyladenosine-3'-phosphate
  modified_base 20: mod_base = OTHER; note = 2'-deoxyadenosine-3'-phosphate ((2S,4R)-1-[29-[[2-(acetylamino)-2-deoxy-beta-D-galactopyra nosyl]oxy]-14,14-bis[[3-[[3-[[5-[[2-(acetylamino)-2-deoxy-b eta-D-galactopyranosyl]oxy]-1-oxopentyl]amino]propyl]amino] -3-oxopropoxy]methyl]-1,12,19,25-tetraoxo-16-oxa-13,20,24-t riazanonacos-1-yl]-4-hydroxy-2-pyrrolidinyl)methyl ester
  misc_feature 1..19: note = RNA
  misc_feature 20: note = DNA
gttaacaccatttacttcaa

SEQ ID NO: 61 - DNA, 20 bp, synthetic construct
  source 1..20: mol_type = other DNA
  modified_base 1: mod_base = OTHER; note = 2'-O-methylguanosine-3'-phosphorothioate
  modified_base 2: mod_base = OTHER; note = 2'-O-methyluridine-3'-phosphorothioate
  modified_base 3: mod_base = OTHER; note = 2'-O-methyluridine-3'-phosphate
  modified_base 4: mod_base = OTHER; note = 2'-O-methyladenosine-3'-phosphate
  modified_base 5: mod_base = OTHER; note = 2'-O-methyladenosine-3'-phosphate
  modified_base 6: mod_base = OTHER; note = 2'-O-methylcytidine-3'-phosphate
  modified_base 7: mod_base = OTHER; note = 2'-O-methyladenosine-3'-phosphate
  modified_base 8: mod_base = OTHER; note = 2'-O-methylcytidine-3'-phosphate
  modified_base 9: mod_base = OTHER; note = 2'-O-methylcytidine-3'-phosphate
  modified_base 10: mod_base = OTHER; note = 2'-O-methyladenosine-3'-phosphate
  modified_base 11: mod_base = OTHER; note = 2'-O-methyluridine-3'-phosphate
  modified_base 12: mod_base = OTHER; note = 2'-O-methyluridine-3'-phosphate
  modified_base 13: mod_base = OTHER; note = 2'-O-methyluridine-3'-phosphate
  modified_base 14: mod_base = OTHER; note = 2'-O-methyladenosine-3'-phosphate
  modified_base 15: mod_base = OTHER; note = 2'-O-methylcytidine-3'-phosphate
  modified_base 16: mod_base = OTHER; note = 2'-O,4'-C-methylmethylene 5-methyluridine-3'-phosphate
  modified_base 17: mod_base = OTHER; note = 2'-O-methyluridine-3'-phosphorothioate
  modified_base 18: mod_base = OTHER; note = 2'-O-methylcytidine-3'-phosphorothioate
  modified_base 19: mod_base = OTHER; note = 2'-O-methyladenosine-3'-phosphate
  modified_base 20: mod_base = OTHER; note = 2'-deoxyadenosine-3'-phosphate ((2S,4R)-1-[29-[[2-(acetylamino)-2-deoxy-beta-D-galactopyra nosyl]oxy]-14,14-bis[[3-[[3-[[5-[[2-(acetylamino)-2-deoxy-b eta-D-galactopyranosyl]oxy]-1-oxopentyl]amino]propyl]amino] -3-oxopropoxy]methyl]-1,12,19,25-tetraoxo-16-oxa-13,20,24-t riazanonacos-1-yl]-4-hydroxy-2-pyrrolidinyl)methyl ester
  misc_feature 1..19: note = RNA
  misc_feature 20: note = DNA
gttaacaccatttacttcaa

SEQ ID NO: 62 - DNA, 20 bp, synthetic construct
  source 1..20: mol_type = other DNA
  modified_base 1: mod_base = OTHER; note = 2'-O-methylguanosine-3'-phosphorothioate
  modified_base 2: mod_base = OTHER; note = 2'-O-methyluridine-3'-phosphorothioate
  modified_base 3: mod_base = OTHER; note = 2'-O-methyluridine-3'-phosphate
  modified_base 4: mod_base = OTHER; note = 2'-O-methyladenosine-3'-phosphate
  modified_base 5: mod_base = OTHER; note = 2'-O-methyladenosine-3'-phosphate
  modified_base 6: mod_base = OTHER; note = 2'-O-methylcytidine-3'-phosphate
  modified_base 7: mod_base = OTHER; note = 2'-O-methyladenosine-3'-phosphate
  modified_base 8: mod_base = OTHER; note = 2'-O-methylcytidine-3'-phosphate
  modified_base 9: mod_base = OTHER; note = 2'-O-methylcytidine-3'-phosphate
  modified_base 10: mod_base = OTHER; note = 2'-O-methyladenosine-3'-phosphate
  modified_base 11: mod_base = OTHER; note = 2'-O-methyluridine-3'-phosphate
  modified_base 12: mod_base = OTHER; note = 2'-O-methyluridine-3'-phosphate
  modified_base 13: mod_base = OTHER; note = 2'-O-methyluridine-3'-phosphate
  modified_base 14: mod_base = OTHER; note = 2'-O-methyladenosine-3'-phosphate
  modified_base 15: mod_base = OTHER; note = 2'-O-methylcytidine-3'-phosphate
  modified_base 16: mod_base = OTHER; note = 2'-O-methyluridine-3'-phosphate
  modified_base 17: mod_base = OTHER; note = 2'-O,4'-C-methylmethylene 5-methyluridine-3'-phosphorothioate
  modified_base 18: mod_base = OTHER; note = 2'-O-methylcytidine-3'-phosphorothioate
  modified_base 19: mod_base = OTHER; note = 2'-O-methyladenosine-3'-phosphate
  modified_base 20: mod_base = OTHER; note = 2'-deoxyadenosine-3'-phosphate ((2S,4R)-1-[29-[[2-(acetylamino)-2-deoxy-beta-D-galactopyra nosyl]oxy]-14,14-bis[[3-[[3-[[5-[[2-(acetylamino)-2-deoxy-b eta-D-galactopyranosyl]oxy]-1-oxopentyl]amino]propyl]amino] -3-oxopropoxy]methyl]-1,12,19,25-tetraoxo-16-oxa-13,20,24-t riazanonacos-1-yl]-4-hydroxy-2-pyrrolidinyl)methyl ester
  misc_feature 1..19: note = RNA
  misc_feature 20: note = DNA
gttaacaccatttacttcaa

SEQ ID NO: 63 - DNA, 20 bp, synthetic construct
  source 1..20: mol_type = other DNA
  modified_base 1: mod_base = OTHER; note = 2'-O-methylguanosine-3'-phosphorothioate
  modified_base 2: mod_base = OTHER; note = 2'-O-methyluridine-3'-phosphorothioate
  modified_base 3: mod_base = OTHER; note = 2'-O-methyluridine-3'-phosphate
  modified_base 4: mod_base = OTHER; note = 2'-O-methyladenosine-3'-phosphate
  modified_base 5: mod_base = OTHER; note = 2'-O-methyladenosine-3'-phosphate
  modified_base 6: mod_base = OTHER; note = 2'-O-methylcytidine-3'-phosphate
  modified_base 7: mod_base = OTHER; note = 2'-O-methyladenosine-3'-phosphate
  modified_base 8: mod_base = OTHER; note = 2'-O-methylcytidine-3'-phosphate
  modified_base 9: mod_base = OTHER; note = 2'-O-methylcytidine-3'-phosphate
  modified_base 10: mod_base = OTHER; note = 2'-O-methyladenosine-3'-phosphate
  modified_base 11: mod_base = OTHER; note = 2'-O-methyluridine-3'-phosphate
  modified_base 12: mod_base = OTHER; note = 2'-O-methyluridine-3'-phosphate
  modified_base 13: mod_base = OTHER; note = 2'-O-methyluridine-3'-phosphate
  modified_base 14: mod_base = OTHER; note = 2'-O-methyladenosine-3'-phosphate
  modified_base 15: mod_base = OTHER; note = 2'-O-methylcytidine-3'-phosphate
  modified_base 16: mod_base = OTHER; note = 2'-O-methyluridine-3'-phosphate
  modified_base 17: mod_base = OTHER; note = 2'-O-methyluridine-3'-phosphorothioate
  modified_base 18: mod_base = OTHER; note = 2'-O,4'-C-methylmethylene 5-methylcytidine-3'-phosphorothioate
  modified_base 19: mod_base = OTHER; note = 2'-O-methyladenosine-3'-phosphate
  modified_base 20: mod_base = OTHER; note = 2'-deoxyadenosine-3'-phosphate ((2S,4R)-1-[29-[[2-(acetylamino)-2-deoxy-beta-D-galactopyra nosyl]oxy]-14,14-bis[[3-[[3-[[5-[[2-(acetylamino)-2-deoxy-b eta-D-galactopyranosyl]oxy]-1-oxopentyl]amino]propyl]amino] -3-oxopropoxy]methyl]-1,12,19,25-tetraoxo-16-oxa-13,20,24-t riazanonacos-1-yl]-4-hydroxy-2-pyrrolidinyl)methyl ester
  misc_feature 1..19: note = RNA
  misc_feature 20: note = DNA
gttaacaccatttacttcaa

SEQ ID NO: 64 - DNA, 20 bp, synthetic construct
  source 1..20: mol_type = other DNA
  modified_base 1: mod_base = OTHER; note = 2'-O-methylguanosine-3'-phosphorothioate
  modified_base 2: mod_base = OTHER; note = 2'-O,4'-C-methylene 5-methyluridine-3'-phosphorothioate
  modified_base 3: mod_base = OTHER; note = 2'-O-methyluridine-3'-phosphate
  modified_base 4: mod_base = OTHER; note = 2'-O-methyladenosine-3'-phosphate
  modified_base 5: mod_base = OTHER; note = 2'-O-methyladenosine-3'-phosphate
  modified_base 6: mod_base = OTHER; note = 2'-O-methylcytidine-3'-phosphate
  modified_base 7: mod_base = OTHER; note = 2'-O-methyladenosine-3'-phosphate
  modified_base 8: mod_base = OTHER; note = 2'-O-methylcytidine-3'-phosphate
  modified_base 9: mod_base = OTHER; note = 2'-O-methylcytidine-3'-phosphate
  modified_base 10: mod_base = OTHER; note = 2'-O-methyladenosine-3'-phosphate
  modified_base 11: mod_base = OTHER; note = 2'-O-methyluridine-3'-phosphate
  modified_base 12: mod_base = OTHER; note = 2'-O-methyluridine-3'-phosphate
  modified_base 13: mod_base = OTHER; note = 2'-O-methyluridine-3'-phosphate
  modified_base 14: mod_base = OTHER; note = 2'-O-methyladenosine-3'-phosphate
  modified_base 15: mod_base = OTHER; note = 2'-O-methylcytidine-3'-phosphate
  modified_base 16: mod_base = OTHER; note = 2'-O-methyluridine-3'-phosphate
  modified_base 17: mod_base = OTHER; note = 2'-O-methyluridine-3'-phosphorothioate
  modified_base 18: mod_base = OTHER; note = 2'-O-methylcytidine-3'-phosphorothioate
  modified_base 19: mod_base = OTHER; note = 2'-O-methyladenosine-3'-phosphate
  modified_base 20: mod_base = OTHER; note = 2'-deoxyadenosine-3'-phosphate ((2S,4R)-1-[29-[[2-(acetylamino)-2-deoxy-beta-D-galactopyra nosyl]oxy]-14,14-bis[[3-[[3-[[5-[[2-(acetylamino)-2-deoxy-b eta-D-galactopyranosyl]oxy]-1-oxopentyl]amino]propyl]amino] -3-oxopropoxy]methyl]-1,12,19,25-tetraoxo-16-oxa-13,20,24-t riazanonacos-1-yl]-4-hydroxy-2-pyrrolidinyl)methyl ester
  misc_feature 1..19: note = RNA
  misc_feature 20: note = DNA
gttaacaccatttacttcaa

SEQ ID NO: 65 - DNA, 20 bp, synthetic construct
  source 1..20: mol_type = other DNA
  modified_base 1: mod_base = OTHER; note = 2'-O-methylguanosine-3'-phosphorothioate
  modified_base 2: mod_base = OTHER; note = 2'-O-methyluridine-3'-phosphorothioate
  modified_base 3: mod_base = OTHER; note = 2'-O,4'-C-methylene 5-methyluridine-3'-phosphate
  modified_base 4: mod_base = OTHER; note = 2'-O-methyladenosine-3'-phosphate
  modified_base 5: mod_base = OTHER; note = 2'-O-methyladenosine-3'-phosphate
  modified_base 6: mod_base = OTHER; note = 2'-O-methylcytidine-3'-phosphate
  modified_base 7: mod_base = OTHER; note = 2'-O-methyladenosine-3'-phosphate
  modified_base 8: mod_base = OTHER; note = 2'-O-methylcytidine-3'-phosphate
  modified_base 9: mod_base = OTHER; note = 2'-O-methylcytidine-3'-phosphate
  modified_base 10: mod_base = OTHER; note = 2'-O-methyladenosine-3'-phosphate
  modified_base 11: mod_base = OTHER; note = 2'-O-methyluridine-3'-phosphate
  modified_base 12: mod_base = OTHER; note = 2'-O-methyluridine-3'-phosphate
  modified_base 13: mod_base = OTHER; note = 2'-O-methyluridine-3'-phosphate
  modified_base 14: mod_base = OTHER; note = 2'-O-methyladenosine-3'-phosphate
  modified_base 15: mod_base = OTHER; note = 2'-O-methylcytidine-3'-phosphate
  modified_base 16: mod_base = OTHER; note = 2'-O-methyluridine-3'-phosphate
  modified_base 17: mod_base = OTHER; note = 2'-O-methyluridine-3'-phosphorothioate
  modified_base 18: mod_base = OTHER; note = 2'-O-methylcytidine-3'-phosphorothioate
  modified_base 19: mod_base = OTHER; note = 2'-O-methyladenosine-3'-phosphate
  modified_base 20: mod_base = OTHER; note = 2'-deoxyadenosine-3'-phosphate ((2S,4R)-1-[29-[[2-(acetylamino)-2-deoxy-beta-D-galactopyra nosyl]oxy]-14,14-bis[[3-[[3-[[5-[[2-(acetylamino)-2-deoxy-b eta-D-galactopyranosyl]oxy]-1-oxopentyl]amino]propyl]amino] -3-oxopropoxy]methyl]-1,12,19,25-tetraoxo-16-oxa-13,20,24-t riazanonacos-1-yl]-4-hydroxy-2-pyrrolidinyl)methyl ester
  misc_feature 1..19: note = RNA
  misc_feature 20: note = DNA
gttaacaccatttacttcaa

SEQ ID NO: 66 - DNA, 20 bp, synthetic construct
  source 1..20: mol_type = other DNA
  modified_base 1: mod_base = OTHER; note = 2'-O-methylguanosine-3'-phosphorothioate
  modified_base 2: mod_base = OTHER; note = 2'-O-methyluridine-3'-phosphorothioate
  modified_base 3: mod_base = OTHER; note = 2'-O-methyluridine-3'-phosphate
  modified_base 4: mod_base = OTHER; note = 2'-O-methyladenosine-3'-phosphate
  modified_base 5: mod_base = OTHER; note = 2'-O-methyladenosine-3'-phosphate
  modified_base 6: mod_base = OTHER; note = 2'-O,4'-C-methylene 5-methylcytidine-3'-phosphate
  modified_base 7: mod_base = OTHER; note = 2'-O-methyladenosine-3'-phosphate
  modified_base 8: mod_base = OTHER; note = 2'-O-methylcytidine-3'-phosphate
  modified_base 9: mod_base = OTHER; note = 2'-O-methylcytidine-3'-phosphate
  modified_base 10: mod_base = OTHER; note = 2'-O-methyladenosine-3'-phosphate
  modified_base 11: mod_base = OTHER; note = 2'-O-methyluridine-3'-phosphate
  modified_base 12: mod_base = OTHER; note = 2'-O-methyluridine-3'-phosphate
  modified_base 13: mod_base = OTHER; note = 2'-O-methyluridine-3'-phosphate
  modified_base 14: mod_base = OTHER; note = 2'-O-methyladenosine-3'-phosphate
  modified_base 15: mod_base = OTHER; note = 2'-O-methylcytidine-3'-phosphate
  modified_base 16: mod_base = OTHER; note = 2'-O-methyluridine-3'-phosphate
  modified_base 17: mod_base = OTHER; note = 2'-O-methyluridine-3'-phosphorothioate
  modified_base 18: mod_base = OTHER; note = 2'-O-methylcytidine-3'-phosphorothioate
  modified_base 19: mod_base = OTHER; note = 2'-O-methyladenosine-3'-phosphate
  modified_base 20: mod_base = OTHER; note = 2'-deoxyadenosine-3'-phosphate ((2S,4R)-1-[29-[[2-(acetylamino)-2-deoxy-beta-D-galactopyra nosyl]oxy]-14,14-bis[[3-[[3-[[5-[[2-(acetylamino)-2-deoxy-b eta-D-galactopyranosyl]oxy]-1-oxopentyl]amino]propyl]amino] -3-oxopropoxy]methyl]-1,12,19,25-tetraoxo-16-oxa-13,20,24-t riazanonacos-1-yl]-4-hydroxy-2-pyrrolidinyl)methyl ester
  misc_feature 1..19: note = RNA
  misc_feature 20: note = DNA
gttaacaccatttacttcaa

SEQ ID NO: 67 - DNA, 20 bp, synthetic construct
  source 1..20: mol_type = other DNA
  modified_base 1: mod_base = OTHER; note = 2'-O-methylguanosine-3'-phosphorothioate
  modified_base 2: mod_base = OTHER; note = 2'-O-methyluridine-3'-phosphorothioate
  modified_base 3: mod_base = OTHER; note = 2'-O-methyluridine-3'-phosphate
  modified_base 4: mod_base = OTHER; note = 2'-O-methyladenosine-3'-phosphate
  modified_base 5: mod_base = OTHER; note = 2'-O-methyladenosine-3'-phosphate
  modified_base 6: mod_base = OTHER; note = 2'-O-methylcytidine-3'-phosphate
  modified_base 7: mod_base = OTHER; note = 2'-O-methyladenosine-3'-phosphate
  modified_base 8: mod_base = OTHER; note = 2'-O,4'-C-methylene 5-methylcytidine-3'-phosphate
  modified_base 9: mod_base = OTHER; note = 2'-O-methylcytidine-3'-phosphate
  modified_base 10: mod_base = OTHER; note = 2'-O-methyladenosine-3'-phosphate
  modified_base 11: mod_base = OTHER; note = 2'-O-methyluridine-3'-phosphate
  modified_base 12: mod_base = OTHER; note = 2'-O-methyluridine-3'-phosphate
  modified_base 13: mod_base = OTHER; note = 2'-O-methyluridine-3'-phosphate
  modified_base 14: mod_base = OTHER; note = 2'-O-methyladenosine-3'-phosphate
  modified_base 15: mod_base = OTHER; note = 2'-O-methylcytidine-3'-phosphate
  modified_base 16: mod_base = OTHER; note = 2'-O-methyluridine-3'-phosphate
  modified_base 17: mod_base = OTHER; note = 2'-O-methyluridine-3'-phosphorothioate
  modified_base 18: mod_base = OTHER; note = 2'-O-methylcytidine-3'-phosphorothioate
  modified_base 19: mod_base = OTHER; note = 2'-O-methyladenosine-3'-phosphate
  modified_base 20: mod_base = OTHER; note = 2'-deoxyadenosine-3'-phosphate ((2S,4R)-1-[29-[[2-(acetylamino)-2-deoxy-beta-D-galactopyra nosyl]oxy]-14,14-bis[[3-[[3-[[5-[[2-(acetylamino)-2-deoxy-b eta-D-galactopyranosyl]oxy]-1-oxopentyl]amino]propyl]amino] -3-oxopropoxy]methyl]-1,12,19,25-tetraoxo-16-oxa-13,20,24-t riazanonacos-1-yl]-4-hydroxy-2-pyrrolidinyl)methyl ester
  misc_feature 1..19: note = RNA
  misc_feature 20: note = DNA
gttaacaccatttacttcaa

SEQ ID NO: 68 - DNA, 20 bp, synthetic construct
  source 1..20: mol_type = other DNA
  modified_base 1: mod_base = OTHER; note = 2'-O-methylguanosine-3'-phosphorothioate
  modified_base 2: mod_base = OTHER; note = 2'-O-methyluridine-3'-phosphorothioate
  modified_base 3: mod_base = OTHER; note = 2'-O-methyluridine-3'-phosphate
  modified_base 4: mod_base = OTHER; note = 2'-O-methyladenosine-3'-phosphate
  modified_base 5: mod_base = OTHER; note = 2'-O-methyladenosine-3'-phosphate
  modified_base 6: mod_base = OTHER; note = 2'-O-methylcytidine-3'-phosphate
  modified_base 7: mod_base = OTHER; note = 2'-O-methyladenosine-3'-phosphate
  modified_base 8: mod_base = OTHER; note = 2'-O-methylcytidine-3'-phosphate
  modified_base 9: mod_base = OTHER; note = 2'-O,4'-C-methylene 5-methylcytidine-3'-phosphate
  modified_base 10: mod_base = OTHER; note = 2'-O-methyladenosine-3'-phosphate
  modified_base 11: mod_base = OTHER; note = 2'-O-methyluridine-3'-phosphate
  modified_base 12: mod_base = OTHER; note = 2'-O-methyluridine-3'-phosphate
  modified_base 13: mod_base = OTHER; note = 2'-O-methyluridine-3'-phosphate
  modified_base 14: mod_base = OTHER; note = 2'-O-methyladenosine-3'-phosphate
  modified_base 15: mod_base = OTHER; note = 2'-O-methylcytidine-3'-phosphate
  modified_base 16: mod_base = OTHER; note = 2'-O-methyluridine-3'-phosphate
  modified_base 17: mod_base = OTHER; note = 2'-O-methyluridine-3'-phosphorothioate
  modified_base 18: mod_base = OTHER; note = 2'-O-methylcytidine-3'-phosphorothioate
  modified_base 19: mod_base = OTHER; note = 2'-O-methyladenosine-3'-phosphate
  modified_base 20: mod_base = OTHER; note = 2'-deoxyadenosine-3'-phosphate ((2S,4R)-1-[29-[[2-(acetylamino)-2-deoxy-beta-D-galactopyra nosyl]oxy]-14,14-bis[[3-[[3-[[5-[[2-(acetylamino)-2-deoxy-b eta-D-galactopyranosyl]oxy]-1-oxopentyl]amino]propyl]amino] -3-oxopropoxy]methyl]-1,12,19,25-tetraoxo-16-oxa-13,20,24-t riazanonacos-1-yl]-4-hydroxy-2-pyrrolidinyl)methyl ester
  misc_feature 1..19: note = RNA
  misc_feature 20: note = DNA
gttaacaccatttacttcaa

SEQ ID NO: 69 - DNA, 20 bp, synthetic construct
  source 1..20: mol_type = other DNA
  modified_base 1: mod_base = OTHER; note = 2'-O-methylguanosine-3'-phosphorothioate
  modified_base 2: mod_base = OTHER; note = 2'-O-methyluridine-3'-phosphorothioate
  modified_base 3: mod_base = OTHER; note = 2'-O-methyluridine-3'-phosphate
  modified_base 4: mod_base = OTHER; note = 2'-O-methyladenosine-3'-phosphate
  modified_base 5: mod_base = OTHER; note = 2'-O-methyladenosine-3'-phosphate
  modified_base 6: mod_base = OTHER; note = 2'-O-methylcytidine-3'-phosphate
  modified_base 7: mod_base = OTHER; note = 2'-O-methyladenosine-3'-phosphate
  modified_base 8: mod_base = OTHER; note = 2'-O-methylcytidine-3'-phosphate
  modified_base 9: mod_base = OTHER; note = 2'-O-methylcytidine-3'-phosphate
  modified_base 10: mod_base = OTHER; note = 2'-O-methyladenosine-3'-phosphate
  modified_base 11: mod_base = OTHER; note = 2'-O,4'-C-methylene 5-methyluridine-3'-phosphate
  modified_base 12: mod_base = OTHER; note = 2'-O-methyluridine-3'-phosphate
  modified_base 13: mod_base = OTHER; note = 2'-O-methyluridine-3'-phosphate
  modified_base 14: mod_base = OTHER; note = 2'-O-methyladenosine-3'-phosphate
  modified_base 15: mod_base = OTHER; note = 2'-O-methylcytidine-3'-phosphate
  modified_base 16: mod_base = OTHER; note = 2'-O-methyluridine-3'-phosphate
  modified_base 17: mod_base = OTHER; note = 2'-O-methyluridine-3'-phosphorothioate
  modified_base 18: mod_base = OTHER; note = 2'-O-methylcytidine-3'-phosphorothioate
  modified_base 19: mod_base = OTHER; note = 2'-O-methyladenosine-3'-phosphate
  modified_base 20: mod_base = OTHER; note = 2'-deoxyadenosine-3'-phosphate ((2S,4R)-1-[29-[[2-(acetylamino)-2-deoxy-beta-D-galactopyra nosyl]oxy]-14,14-bis[[3-[[3-[[5-[[2-(acetylamino)-2-deoxy-b eta-D-galactopyranosyl]oxy]-1-oxopentyl]amino]propyl]amino] -3-oxopropoxy]methyl]-1,12,19,25-tetraoxo-16-oxa-13,20,24-t riazanonacos-1-yl]-4-hydroxy-2-pyrrolidinyl)methyl ester
  misc_feature 1..19: note = RNA
  misc_feature 20: note = DNA
gttaacaccatttacttcaa

SEQ ID NO: 70 - DNA, 20 bp, synthetic construct
  source 1..20: mol_type = other DNA
  modified_base 1: mod_base = OTHER; note = 2'-O-methylguanosine-3'-phosphorothioate
  modified_base 2: mod_base = OTHER; note = 2'-O-methyluridine-3'-phosphorothioate
  modified_base 3: mod_base = OTHER; note = 2'-O-methyluridine-3'-phosphate
  modified_base 4: mod_base = OTHER; note = 2'-O-methyladenosine-3'-phosphate
  modified_base 5: mod_base = OTHER; note = 2'-O-methyladenosine-3'-phosphate
  modified_base 6: mod_base = OTHER; note = 2'-O-methylcytidine-3'-phosphate
  modified_base 7: mod_base = OTHER; note = 2'-O-methyladenosine-3'-phosphate
  modified_base 8: mod_base = OTHER; note = 2'-O-methylcytidine-3'-phosphate
  modified_base 9: mod_base = OTHER; note = 2'-O-methylcytidine-3'-phosphate
  modified_base 10: mod_base = OTHER; note = 2'-O-methyladenosine-3'-phosphate
  modified_base 11: mod_base = OTHER; note = 2'-O-methyluridine-3'-phosphate
  modified_base 12: mod_base = OTHER; note = 2'-O,4'-C-methylene 5-methyluridine-3'-phosphate
  modified_base 13: mod_base = OTHER; note = 2'-O-methyluridine-3'-phosphate
  modified_base 14: mod_base = OTHER; note = 2'-O-methyladenosine-3'-phosphate
  modified_base 15: mod_base = OTHER; note = 2'-O-methylcytidine-3'-phosphate
  modified_base 16: mod_base = OTHER; note = 2'-O-methyluridine-3'-phosphate
  modified_base 17: mod_base = OTHER; note = 2'-O-methyluridine-3'-phosphorothioate
  modified_base 18: mod_base = OTHER; note = 2'-O-methylcytidine-3'-phosphorothioate
  modified_base 19: mod_base = OTHER; note = 2'-O-methyladenosine-3'-phosphate
  modified_base 20: mod_base = OTHER; note = 2'-deoxyadenosine-3'-phosphate ((2S,4R)-1-[29-[[2-(acetylamino)-2-deoxy-beta-D-galactopyra nosyl]oxy]-14,14-bis[[3-[[3-[[5-[[2-(acetylamino)-2-deoxy-b eta-D-galactopyranosyl]oxy]-1-oxopentyl]amino]propyl]amino] -3-oxopropoxy]methyl]-1,12,19,25-tetraoxo-16-oxa-13,20,24-t riazanonacos-1-yl]-4-hydroxy-2-pyrrolidinyl)methyl ester
  misc_feature 1..19: note = RNA
  misc_feature 20: note = DNA
gttaacaccatttacttcaa

SEQ ID NO: 71 - DNA, 20 bp, synthetic construct
  source 1..20: mol_type = other DNA
  modified_base 1: mod_base = OTHER; note = 2'-O-methylguanosine-3'-phosphorothioate
  modified_base 2: mod_base = OTHER; note = 2'-O-methyluridine-3'-phosphorothioate
  modified_base 3: mod_base = OTHER; note = 2'-O-methyluridine-3'-phosphate
  modified_base 4: mod_base = OTHER; note = 2'-O-methyladenosine-3'-phosphate
  modified_base 5: mod_base = OTHER; note = 2'-O-methyladenosine-3'-phosphate
  modified_base 6: mod_base = OTHER; note = 2'-O-methylcytidine-3'-phosphate
  modified_base 7: mod_base = OTHER; note = 2'-O-methyladenosine-3'-phosphate
  modified_base 8: mod_base = OTHER; note = 2'-O-methylcytidine-3'-phosphate
  modified_base 9: mod_base = OTHER; note = 2'-O-methylcytidine-3'-phosphate
  modified_base 10: mod_base = OTHER; note = 2'-O-methyladenosine-3'-phosphate
  modified_base 11: mod_base = OTHER; note = 2'-O-methyluridine-3'-phosphate
  modified_base 12: mod_base = OTHER; note = 2'-O-methyluridine-3'-phosphate
  modified_base 13: mod_base = OTHER; note = 2'-O,4'-C-methylene 5-methyluridine-3'-phosphate
  modified_base 14: mod_base = OTHER; note = 2'-O-methyladenosine-3'-phosphate
  modified_base 15: mod_base = OTHER; note = 2'-O-methylcytidine-3'-phosphate
  modified_base 16: mod_base = OTHER; note = 2'-O-methyluridine-3'-phosphate
  modified_base 17: mod_base = OTHER; note = 2'-O-methyluridine-3'-phosphorothioate
  modified_base 18: mod_base = OTHER; note = 2'-O-methylcytidine-3'-phosphorothioate
  modified_base 19: mod_base = OTHER; note = 2'-O-methyladenosine-3'-phosphate
  modified_base 20: mod_base = OTHER; note = 2'-deoxyadenosine-3'-phosphate ((2S,4R)-1-[29-[[2-(acetylamino)-2-deoxy-beta-D-galactopyra nosyl]oxy]-14,14-bis[[3-[[3-[[5-[[2-(acetylamino)-2-deoxy-b eta-D-galactopyranosyl]oxy]-1-oxopentyl]amino]propyl]amino] -3-oxopropoxy]methyl]-1,12,19,25-tetraoxo-16-oxa-13,20,24-t riazanonacos-1-yl]-4-hydroxy-2-pyrrolidinyl)methyl ester
  misc_feature 1..19: note = RNA
  misc_feature 20: note = DNA
gttaacaccatttacttcaa

SEQ ID NO: 72 - DNA, 20 bp, synthetic construct
  source 1..20: mol_type = other DNA
  modified_base 1: mod_base = OTHER; note = 2'-O-methylguanosine-3'-phosphorothioate
  modified_base 2: mod_base = OTHER; note = 2'-O-methyluridine-3'-phosphorothioate
  modified_base 3: mod_base = OTHER; note = 2'-O-methyluridine-3'-phosphate
  modified_base 4: mod_base = OTHER; note = 2'-O-methyladenosine-3'-phosphate
  modified_base 5: mod_base = OTHER; note = 2'-O-methyladenosine-3'-phosphate
  modified_base 6: mod_base = OTHER; note = 2'-O-methylcytidine-3'-phosphate
  modified_base 7: mod_base = OTHER; note = 2'-O-methyladenosine-3'-phosphate
  modified_base 8: mod_base = OTHER; note = 2'-O-methylcytidine-3'-phosphate
  modified_base 9: mod_base = OTHER; note = 2'-O-methylcytidine-3'-phosphate
  modified_base 10: mod_base = OTHER; note = 2'-O-methyladenosine-3'-phosphate
  modified_base 11: mod_base = OTHER; note = 2'-O-methyluridine-3'-phosphate
  modified_base 12: mod_base = OTHER; note = 2'-O-methyluridine-3'-phosphate
  modified_base 13: mod_base = OTHER; note = 2'-O-methyluridine-3'-phosphate
  modified_base 14: mod_base = OTHER; note = 2'-O-methyladenosine-3'-phosphate
  modified_base 15: mod_base = OTHER; note = 2'-O,4'-C-methylene 5-methylcytidine-3'-phosphate
  modified_base 16: mod_base = OTHER; note = 2'-O-methyluridine-3'-phosphate
  modified_base 17: mod_base = OTHER; note = 2'-O-methyluridine-3'-phosphorothioate
  modified_base 18: mod_base = OTHER; note = 2'-O-methylcytidine-3'-phosphorothioate
  modified_base 19: mod_base = OTHER; note = 2'-O-methyladenosine-3'-phosphate
  modified_base 20: mod_base = OTHER; note = 2'-deoxyadenosine-3'-phosphate ((2S,4R)-1-[29-[[2-(acetylamino)-2-deoxy-beta-D-galactopyra nosyl]oxy]-14,14-bis[[3-[[3-[[5-[[2-(acetylamino)-2-deoxy-b eta-D-galactopyranosyl]oxy]-1-oxopentyl]amino]propyl]amino] -3-oxopropoxy]methyl]-1,12,19,25-tetraoxo-16-oxa-13,20,24-t riazanonacos-1-yl]-4-hydroxy-2-pyrrolidinyl)methyl ester
  misc_feature 1..19: note = RNA
  misc_feature 20: note = DNA
gttaacaccatttacttcaa

SEQ ID NO: 73 - DNA, 20 bp, synthetic construct
  source 1..20: mol_type = other DNA
  modified_base 1: mod_base = OTHER; note = 2'-O-methylguanosine-3'-phosphorothioate
  modified_base 2: mod_base = OTHER; note = 2'-O-methyluridine-3'-phosphorothioate
  modified_base 3: mod_base = OTHER; note = 2'-O-methyluridine-3'-phosphate
  modified_base 4: mod_base = OTHER; note = 2'-O-methyladenosine-3'-phosphate
  modified_base 5: mod_base = OTHER; note = 2'-O-methyladenosine-3'-phosphate
  modified_base 6: mod_base = OTHER; note = 2'-O-methylcytidine-3'-phosphate
  modified_base 7: mod_base = OTHER; note = 2'-O-methyladenosine-3'-phosphate
  modified_base 8: mod_base = OTHER; note = 2'-O-methylcytidine-3'-phosphate
  modified_base 9: mod_base = OTHER; note = 2'-O-methylcytidine-3'-phosphate
  modified_base 10: mod_base = OTHER; note = 2'-O-methyladenosine-3'-phosphate
  modified_base 11: mod_base = OTHER; note = 2'-O-methyluridine-3'-phosphate
  modified_base 12: mod_base = OTHER; note = 2'-O-methyluridine-3'-phosphate
  modified_base 13: mod_base = OTHER; note = 2'-O-methyluridine-3'-phosphate
  modified_base 14: mod_base = OTHER; note = 2'-O-methyladenosine-3'-phosphate
  modified_base 15: mod_base = OTHER; note = 2'-O-methylcytidine-3'-phosphate
  modified_base 16: mod_base = OTHER; note = 2'-O,4'-C-methylene 5-methyluridine-3'-phosphate
  modified_base 17: mod_base = OTHER; note = 2'-O-methyluridine-3'-phosphorothioate
  modified_base 18: mod_base = OTHER; note = 2'-O-methylcytidine-3'-phosphorothioate
  modified_base 19: mod_base = OTHER; note = 2'-O-methyladenosine-3'-phosphate
  modified_base 20: mod_base = OTHER; note = 2'-deoxyadenosine-3'-phosphate ((2S,4R)-1-[29-[[2-(acetylamino)-2-deoxy-beta-D-galactopyra nosyl]oxy]-14,14-bis[[3-[[3-[[5-[[2-(acetylamino)-2-deoxy-b eta-D-galactopyranosyl]oxy]-1-oxopentyl]amino]propyl]amino] -3-oxopropoxy]methyl]-1,12,19,25-tetraoxo-16-oxa-13,20,24-t riazanonacos-1-yl]-4-hydroxy-2-pyrrolidinyl)methyl ester
  misc_feature 1..19: note = RNA
  misc_feature 20: note = DNA
gttaacaccatttacttcaa

SEQ ID NO: 74 - DNA, 20 bp, synthetic construct
  source 1..20: mol_type = other DNA
  modified_base 1: mod_base = OTHER; note = 2'-O-methylguanosine-3'-phosphorothioate
  modified_base 2: mod_base = OTHER; note = 2'-O-methyluridine-3'-phosphorothioate
  modified_base 3: mod_base = OTHER; note = 2'-O-methyluridine-3'-phosphate
  modified_base 4: mod_base = OTHER; note = 2'-O-methyladenosine-3'-phosphate
  modified_base 5: mod_base = OTHER; note = 2'-O-methyladenosine-3'-phosphate
  modified_base 6: mod_base = OTHER; note = 2'-O-methylcytidine-3'-phosphate
  modified_base 7: mod_base = OTHER; note = 2'-O-methyladenosine-3'-phosphate
  modified_base 8: mod_base = OTHER; note = 2'-O-methylcytidine-3'-phosphate
  modified_base 9: mod_base = OTHER; note = 2'-O-methylcytidine-3'-phosphate
  modified_base 10: mod_base = OTHER; note = 2'-O-methyladenosine-3'-phosphate
  modified_base 11: mod_base = OTHER; note = 2'-O-methyluridine-3'-phosphate
  modified_base 12: mod_base = OTHER; note = 2'-O-methyluridine-3'-phosphate
  modified_base 13: mod_base = OTHER; note = 2'-O-methyluridine-3'-phosphate
  modified_base 14: mod_base = OTHER; note = 2'-O-methyladenosine-3'-phosphate
  modified_base 15: mod_base = OTHER; note = 2'-O-methylcytidine-3'-phosphate
  modified_base 16: mod_base = OTHER; note = 2'-O-methyluridine-3'-phosphate
  modified_base 17: mod_base = OTHER; note = 2'-O,4'-C-methylene 5-methyluridine-3'-phosphorothioate
  modified_base 18: mod_base = OTHER; note = 2'-O-methylcytidine-3'-phosphorothioate
  modified_base 19: mod_base = OTHER; note = 2'-O-methyladenosine-3'-phosphate
  modified_base 20: mod_base = OTHER; note = 2'-deoxyadenosine-3'-phosphate ((2S,4R)-1-[29-[[2-(acetylamino)-2-deoxy-beta-D-galactopyra nosyl]oxy]-14,14-bis[[3-[[3-[[5-[[2-(acetylamino)-2-deoxy-b eta-D-galactopyranosyl]oxy]-1-oxopentyl]amino]propyl]amino] -3-oxopropoxy]methyl]-1,12,19,25-tetraoxo-16-oxa-13,20,24-t riazanonacos-1-yl]-4-hydroxy-2-pyrrolidinyl)methyl ester
  misc_feature 1..19: note = RNA
  misc_feature 20: note = DNA
gttaacaccatttacttcaa

SEQ ID NO: 75 - DNA, 20 bp, synthetic construct
  source 1..20: mol_type = other DNA
  modified_base 1: mod_base = OTHER; note = 2'-O-methylguanosine-3'-phosphorothioate
  modified_base 2: mod_base = OTHER; note = 2'-O-methyluridine-3'-phosphorothioate
  modified_base 3: mod_base = OTHER; note = 2'-O-methyluridine-3'-phosphate
  modified_base 4: mod_base = OTHER; note = 2'-O-methyladenosine-3'-phosphate
  modified_base 5: mod_base = OTHER; note = 2'-O-methyladenosine-3'-phosphate
  modified_base 6: mod_base = OTHER; note = 2'-O-methylcytidine-3'-phosphate
  modified_base 7: mod_base = OTHER; note = 2'-O-methyladenosine-3'-phosphate
  modified_base 8: mod_base = OTHER; note = 2'-O-methylcytidine-3'-phosphate
  modified_base 9: mod_base = OTHER; note = 2'-O-methylcytidine-3'-phosphate
  modified_base 10: mod_base = OTHER; note = 2'-O-methyladenosine-3'-phosphate
  modified_base 11: mod_base = OTHER; note = 2'-O-methyluridine-3'-phosphate
  modified_base 12: mod_base = OTHER; note = 2'-O-methyluridine-3'-phosphate
  modified_base 13: mod_base = OTHER; note = 2'-O-methyluridine-3'-phosphate
  modified_base 14: mod_base = OTHER; note = 2'-O-methyladenosine-3'-phosphate
  modified_base 15: mod_base = OTHER; note = 2'-O-methylcytidine-3'-phosphate
  modified_base 16: mod_base = OTHER; note = 2'-O-methyluridine-3'-phosphate
  modified_base 17: mod_base = OTHER; note = 2'-O-methyluridine-3'-phosphorothioate
  modified_base 18: mod_base = OTHER; note = 2'-O,4'-C-methylene 5-methylcytidine-3'-phosphorothioate
  modified_base 19: mod_base = OTHER; note = 2'-O-methyladenosine-3'-phosphate
  modified_base 20: mod_base = OTHER; note = 2'-deoxyadenosine-3'-phosphate ((2S,4R)-1-[29-[[2-(acetylamino)-2-deoxy-beta-D-galactopyra nosyl]oxy]-14,14-bis[[3-[[3-[[5-[[2-(acetylamino)-2-deoxy-b eta-D-galactopyranosyl]oxy]-1-oxopentyl]amino]propyl]amino] -3-oxopropoxy]methyl]-1,12,19,25-tetraoxo-16-oxa-13,20,24-t riazanonacos-1-yl]-4-hydroxy-2-pyrrolidinyl)methyl ester
  misc_feature 1..19: note = RNA
  misc_feature 20: note = DNA
gttaacaccatttacttcaa

SEQ ID NO: 76 - DNA, 20 bp, synthetic construct
  source 1..20: mol_type = other DNA
  modified_base 1: mod_base = OTHER; note = 2'-O-methylguanosine-3'-phosphorothioate
  modified_base 2: mod_base = OTHER; note = 2'-O-methyluridine-3'-phosphorothioate
  modified_base 3: mod_base = OTHER; note = 2'-O-methyluridine-3'-phosphorothioate
  modified_base 4: mod_base = OTHER; note = 2'-O-methyladenosine-3'-phosphorothioate
  modified_base 5: mod_base = OTHER; note = 2'-O-methyladenosine-3'-phosphorothioate
  modified_base 6: mod_base = OTHER; note 1'-(9-(2-aminoethoxy)-1H-benzo[b]pyrimido[4,5-e][1,4]oxazin -2(3H)-on-3-yl)-1'-deoxy-2'-O-methyl-beta-ribofuranose 3'-phosphorothioate
  modified_base 7: mod_base = OTHER; note = 2'-O-methyladenosine-3'-phosphorothioate
  modified_base 8: mod_base = OTHER; note = 2'-O-methylcytidine-3'-phosphorothioate
  modified_base 9: mod_base = OTHER; note = 2'-O-methylcytidine-3'-phosphorothioate
  modified_base 10: mod_base = OTHER; note = 2'-O-methyladenosine-3'-phosphorothioate
  modified_base 11: mod_base = OTHER; note = 2'-O-methyluridine-3'-phosphorothioate
  modified_base 12: mod_base = OTHER; note = 2'-O-methyluridine-3'-phosphorothioate
  modified_base 13: mod_base = OTHER; note = 2'-O-methyluridine-3'-phosphorothioate
  modified_base 14: mod_base = OTHER; note = 2'-O-methyladenosine-3'-phosphorothioate
  modified_base 15: mod_base = OTHER; note = 2'-O-methylcytidine-3'-phosphorothioate
  modified_base 16: mod_base = OTHER; note = 2'-O-methyluridine-3'-phosphorothioate
  modified_base 17: mod_base = OTHER; note = 2'-O-methyluridine-3'-phosphorothioate
  modified_base 18: mod_base = OTHER; note 1'-(9-(2-aminoethoxy)-1H-benzo[b]pyrimido[4,5-e][1,4]oxazin -2(3H)-on-3-yl)-1'-deoxy-2'-O-methyl-beta-ribofuranose 3'-phosphorothioate
  modified_base 19: mod_base = OTHER; note = 2'-O-methyladenosine-3'-phosphate
  modified_base 20: mod_base = OTHER; note = 2'-deoxyadenosine-3'-phosphate ((2S,4R)-1-[29-[[2-(acetylamino)-2-deoxy-beta-D-galactopyra nosyl]oxy]-14,14-bis[[3-[[3-[[5-[[2-(acetylamino)-2-deoxy-b eta-D-galactopyranosyl]oxy]-1-oxopentyl]amino]propyl]amino] -3-oxopropoxy]methyl]-1,12,19,25-tetraoxo-16-oxa-13,20,24-t riazanonacos-1-yl]-4-hydroxy-2-pyrrolidinyl)methyl ester
  misc_feature 1..19: note = RNA
  misc_feature 20: note = DNA
gttaanaccatttacttnaa

SEQ ID NO: 77 - DNA, 20 bp, synthetic construct
  source 1..20: mol_type = other DNA
  modified_base 1: mod_base = OTHER; note = 2'-O-methylguanosine-3'-phosphorothioate
  modified_base 2: mod_base = OTHER; note = 2'-O-methyluridine-3'-phosphorothioate
  modified_base 3: mod_base = OTHER; note = 2'-O-methyluridine-3'-phosphorothioate
  modified_base 4: mod_base = OTHER; note = 2'-O-methyladenosine-3'-phosphorothioate
  modified_base 5: mod_base = OTHER; note = 2'-O-methyladenosine-3'-phosphorothioate
  modified_base 6: mod_base = OTHER; note 1'-(9-(2-aminoethoxy)-1H-benzo[b]pyrimido[4,5-e][1,4]oxazin -2(3H)-on-3-yl)-1'-deoxy-2'-O-methyl-beta-ribofuranose 3'-phosphorothioate
  modified_base 7: mod_base = OTHER; note = 2'-O-methyladenosine-3'-phosphorothioate
  modified_base 8: mod_base = OTHER; note = 2'-O-methylcytidine-3'-phosphorothioate
  modified_base 9: mod_base = OTHER; note = 2'-O-methylcytidine-3'-phosphorothioate
  modified_base 10: mod_base = OTHER; note = 2'-O-methyladenosine-3'-phosphorothioate
  modified_base 11: mod_base = OTHER; note = 2'-O-methyluridine-3'-phosphorothioate
  modified_base 12: mod_base = OTHER; note = 2'-O-methyluridine-3'-phosphorothioate
  modified_base 13: mod_base = OTHER; note = 2'-O-methyluridine-3'-phosphorothioate
  modified_base 14: mod_base = OTHER; note = 2'-O-methyladenosine-3'-phosphorothioate
  modified_base 15: mod_base = OTHER; note 1'-(9-(2-aminoethoxy)-1H-benzo[b]pyrimido[4,5-e][1,4]oxazin -2(3H)-on-3-yl)-1'-deoxy-2'-O-methyl-beta-ribofuranose 3'-phosphorothioate
  modified_base 16: mod_base = OTHER; note = 2'-O-methyluridine-3'-phosphorothioate
  modified_base 17: mod_base = OTHER; note = 2'-O-methyluridine-3'-phosphorothioate
  modified_base 18: mod_base = OTHER; note = 2'-O-methylcytidine-3'-phosphorothioate
  modified_base 19: mod_base = OTHER; note = 2'-O-methyladenosine-3'-phosphate
  modified_base 20: mod_base = OTHER; note = 2'-deoxyadenosine-3'-phosphate ((2S,4R)-1-[29-[[2-(acetylamino)-2-deoxy-beta-D-galactopyra nosyl]oxy]-14,14-bis[[3-[[3-[[5-[[2-(acetylamino)-2-deoxy-b eta-D-galactopyranosyl]oxy]-1-oxopentyl]amino]propyl]amino] -3-oxopropoxy]methyl]-1,12,19,25-tetraoxo-16-oxa-13,20,24-t riazanonacos-1-yl]-4-hydroxy-2-pyrrolidinyl)methyl ester
  misc_feature 1..19: note = RNA
  misc_feature 20: note = DNA
gttaanaccatttanttcaa

SEQ ID NO: 78 - DNA, 20 bp, synthetic construct
  source 1..20: mol_type = other DNA
  modified_base 1: mod_base = OTHER; note = 2'-O-methylguanosine-3'-phosphorothioate
  modified_base 2: mod_base = OTHER; note = 2'-O-methyluridine-3'-phosphorothioate
  modified_base 3: mod_base = OTHER; note = 2'-O-methyluridine-3'-phosphorothioate
  modified_base 4: mod_base = OTHER; note = 2'-O-methyladenosine-3'-phosphorothioate
  modified_base 5: mod_base = OTHER; note = 2'-O-methyladenosine-3'-phosphorothioate
  modified_base 6: mod_base = OTHER; note = 2'-O-methylcytidine-3'-phosphorothioate
  modified_base 7: mod_base = OTHER; note = 2'-O-methyladenosine-3'-phosphorothioate
  modified_base 8: mod_base = OTHER; note 1'-(9-(2-aminoethoxy)-1H-benzo[b]pyrimido[4,5-e][1,4]oxazin -2(3H)-on-3-yl)-1'-deoxy-2'-O-methyl-beta-ribofuranose 3'-phosphorothioate
  modified_base 9: mod_base = OTHER; note = 2'-O-methylcytidine-3'-phosphorothioate
  modified_base 10: mod_base = OTHER; note = 2'-O-methyladenosine-3'-phosphorothioate
  modified_base 11: mod_base = OTHER; note = 2'-O-methyluridine-3'-phosphorothioate
  modified_base 12: mod_base = OTHER; note = 2'-O-methyluridine-3'-phosphorothioate
  modified_base 13: mod_base = OTHER; note = 2'-O-methyluridine-3'-phosphorothioate
  modified_base 14: mod_base = OTHER; note = 2'-O-methyladenosine-3'-phosphorothioate
  modified_base 15: mod_base = OTHER; note = 2'-O-methylcytidine-3'-phosphorothioate
  modified_base 16: mod_base = OTHER; note = 2'-O-methyluridine-3'-phosphorothioate
  modified_base 17: mod_base = OTHER; note = 2'-O-methyluridine-3'-phosphorothioate
  modified_base 18: mod_base = OTHER; note 1'-(9-(2-aminoethoxy)-1H-benzo[b]pyrimido[4,5-e][1,4]oxazin -2(3H)-on-3-yl)-1'-deoxy-2'-O-methyl-beta-ribofuranose 3'-phosphorothioate
  modified_base 19: mod_base = OTHER; note = 2'-O-methyladenosine-3'-phosphate
  modified_base 20: mod_base = OTHER; note = 2'-deoxyadenosine-3'-phosphate ((2S,4R)-1-[29-[[2-(acetylamino)-2-deoxy-beta-D-galactopyra nosyl]oxy]-14,14-bis[[3-[[3-[[5-[[2-(acetylamino)-2-deoxy-b eta-D-galactopyranosyl]oxy]-1-oxopentyl]amino]propyl]amino] -3-oxopropoxy]methyl]-1,12,19,25-tetraoxo-16-oxa-13,20,24-t riazanonacos-1-yl]-4-hydroxy-2-pyrrolidinyl)methyl ester
  misc_feature 1..19: note = RNA
  misc_feature 20: note = DNA
gttaacancatttacttnaa

SEQ ID NO: 79 - DNA, 20 bp, synthetic construct
  source 1..20: mol_type = other DNA
  modified_base 1: mod_base = OTHER; note = 2'-O-methylguanosine-3'-phosphorothioate
  modified_base 2: mod_base = OTHER; note = 2'-O-methyluridine-3'-phosphorothioate
  modified_base 3: mod_base = OTHER; note = 2'-O-methyluridine-3'-phosphorothioate
  modified_base 4: mod_base = OTHER; note = 2'-O-methyladenosine-3'-phosphorothioate
  modified_base 5: mod_base = OTHER; note = 2'-O-methyladenosine-3'-phosphorothioate
  modified_base 6: mod_base = OTHER; note = 2'-O-methylcytidine-3'-phosphorothioate
  modified_base 7: mod_base = OTHER; note = 2'-O-methyladenosine-3'-phosphorothioate
  modified_base 8: mod_base = OTHER; note = 2'-O-methylcytidine-3'-phosphorothioate
  modified_base 9: mod_base = OTHER; note 1'-(9-(2-aminoethoxy)-1H-benzo[b]pyrimido[4,5-e][1,4]oxazin -2(3H)-on-3-yl)-1'-deoxy-2'-O-methyl-beta-ribofuranose 3'-phosphorothioate
  modified_base 10: mod_base = OTHER; note = 2'-O-methyladenosine-3'-phosphorothioate
  modified_base 11: mod_base = OTHER; note = 2'-O-methyluridine-3'-phosphorothioate
  modified_base 12: mod_base = OTHER; note = 2'-O-methyluridine-3'-phosphorothioate
  modified_base 13: mod_base = OTHER; note = 2'-O-methyluridine-3'-phosphorothioate
  modified_base 14: mod_base = OTHER; note = 2'-O-methyladenosine-3'-phosphorothioate
  modified_base 15: mod_base = OTHER; note 1'-(9-(2-aminoethoxy)-1H-benzo[b]pyrimido[4,5-e][1,4]oxazin -2(3H)-on-3-yl)-1'-deoxy-2'-O-methyl-beta-ribofuranose 3'-phosphorothioate
  modified_base 16: mod_base = OTHER; note = 2'-O-methyluridine-3'-phosphorothioate
  modified_base 17: mod_base = OTHER; note = 2'-O-methyluridine-3'-phosphorothioate
  modified_base 18: mod_base = OTHER; note = 2'-O-methylcytidine-3'-phosphorothioate
  modified_base 19: mod_base = OTHER; note = 2'-O-methyladenosine-3'-phosphate
  modified_base 20: mod_base = OTHER; note = 2'-deoxyadenosine-3'-phosphate ((2S,4R)-1-[29-[[2-(acetylamino)-2-deoxy-beta-D-galactopyra nosyl]oxy]-14,14-bis[[3-[[3-[[5-[[2-(acetylamino)-2-deoxy-b eta-D-galactopyranosyl]oxy]-1-oxopentyl]amino]propyl]amino] -3-oxopropoxy]methyl]-1,12,19,25-tetraoxo-16-oxa-13,20,24-t riazanonacos-1-yl]-4-hydroxy-2-pyrrolidinyl)methyl ester
  misc_feature 1..19: note = RNA
  misc_feature 20: note = DNA
gttaacacnatttanttcaa

SEQ ID NO: 80 - DNA, 20 bp, synthetic construct
  source 1..20: mol_type = other DNA
  modified_base 1: mod_base = OTHER; note = 2'-O-methylguanosine-3'-phosphorothioate
  modified_base 2: mod_base = OTHER; note = 2'-O-methyluridine-3'-phosphorothioate
  modified_base 3: mod_base = OTHER; note = 2'-O-methyluridine-3'-phosphorothioate
  modified_base 4: mod_base = OTHER; note = 2'-O-methyladenosine-3'-phosphorothioate
  modified_base 5: mod_base = OTHER; note = 2'-O-methyladenosine-3'-phosphorothioate
  modified_base 6: mod_base = OTHER; note 1'-(9-(2-aminoethoxy)-1H-benzo[b]pyrimido[4,5-e][1,4]oxazin -2(3H)-on-3-yl)-1'-deoxy-2'-O-methyl-beta-ribofuranose 3'-phosphorothioate
  modified_base 7: mod_base = OTHER; note = 2'-O-methyladenosine-3'-phosphorothioate
  modified_base 8: mod_base = OTHER; note 1'-(9-(2-aminoethoxy)-1H-benzo[b]pyrimido[4,5-e][1,4]oxazin -2(3H)-on-3-yl)-1'-deoxy-2'-O-methyl-beta-ribofuranose 3'-phosphorothioate
  modified_base 9: mod_base = OTHER; note = 2'-O-methylcytidine-3'-phosphorothioate
  modified_base 10: mod_base = OTHER; note = 2'-O-methyladenosine-3'-phosphorothioate
  modified_base 11: mod_base = OTHER; note = 2'-O-methyluridine-3'-phosphorothioate
  modified_base 12: mod_base = OTHER; note = 2'-O-methyluridine-3'-phosphorothioate
  modified_base 13: mod_base = OTHER; note = 2'-O-methyluridine-3'-phosphorothioate
  modified_base 14: mod_base = OTHER; note = 2'-O-methyladenosine-3'-phosphorothioate
  modified_base 15: mod_base = OTHER; note = 2'-O-methylcytidine-3'-phosphorothioate
  modified_base 16: mod_base = OTHER; note = 2'-O-methyluridine-3'-phosphorothioate
  modified_base 17: mod_base = OTHER; note = 2'-O-methyluridine-3'-phosphorothioate
  modified_base 18: mod_base = OTHER; note = 2'-O-methylcytidine-3'-phosphorothioate
  modified_base 19: mod_base = OTHER; note = 2'-O-methyladenosine-3'-phosphate
  modified_base 20: mod_base = OTHER; note = 2'-deoxyadenosine-3'-phosphate ((2S,4R)-1-[29-[[2-(acetylamino)-2-deoxy-beta-D-galactopyra nosyl]oxy]-14,14-bis[[3-[[3-[[5-[[2-(acetylamino)-2-deoxy-b eta-D-galactopyranosyl]oxy]-1-oxopentyl]amino]propyl]amino] -3-oxopropoxy]methyl]-1,12,19,25-tetraoxo-16-oxa-13,20,24-t riazanonacos-1-yl]-4-hydroxy-2-pyrrolidinyl)methyl ester
  misc_feature 1..19: note = RNA
  misc_feature 20: note = DNA
gttaanancatttacttcaa

SEQ ID NO: 81 - DNA, 20 bp, synthetic construct
  source 1..20: mol_type = other DNA
  modified_base 1: mod_base = OTHER; note = 2'-O-methylguanosine-3'-phosphorothioate
  modified_base 2: mod_base = OTHER; note = 2'-O-methyluridine-3'-phosphorothioate
  modified_base 3: mod_base = OTHER; note = 2'-O-methyluridine-3'-phosphorothioate
  modified_base 4: mod_base = OTHER; note = 2'-O-methyladenosine-3'-phosphorothioate
  modified_base 5: mod_base = OTHER; note = 2'-O-methyladenosine-3'-phosphorothioate
  modified_base 6: mod_base = OTHER; note 1'-(9-(2-aminoethoxy)-1H-benzo[b]pyrimido[4,5-e][1,4]oxazin -2(3H)-on-3-yl)-1'-deoxy-2'-O-methyl-beta-ribofuranose 3'-phosphorothioate
  modified_base 7: mod_base = OTHER; note = 2'-O-methyladenosine-3'-phosphorothioate
  modified_base 8: mod_base = OTHER; note = 2'-O-methylcytidine-3'-phosphorothioate
  modified_base 9: mod_base = OTHER; note 1'-(9-(2-aminoethoxy)-1H-benzo[b]pyrimido[4,5-e][1,4]oxazin -2(3H)-on-3-yl)-1'-deoxy-2'-O-methyl-beta-ribofuranose 3'-phosphorothioate
  modified_base 10: mod_base = OTHER; note = 2'-O-methyladenosine-3'-phosphorothioate
  modified_base 11: mod_base = OTHER; note = 2'-O-methyluridine-3'-phosphorothioate
  modified_base 12: mod_base = OTHER; note = 2'-O-methyluridine-3'-phosphorothioate
  modified_base 13: mod_base = OTHER; note = 2'-O-methyluridine-3'-phosphorothioate
  modified_base 14: mod_base = OTHER; note = 2'-O-methyladenosine-3'-phosphorothioate
  modified_base 15: mod_base = OTHER; note = 2'-O-methylcytidine-3'-phosphorothioate
  modified_base 16: mod_base = OTHER; note = 2'-O-methyluridine-3'-phosphorothioate
  modified_base 17: mod_base = OTHER; note = 2'-O-methyluridine-3'-phosphorothioate
  modified_base 18: mod_base = OTHER; note = 2'-O-methylcytidine-3'-phosphorothioate
  modified_base 19: mod_base = OTHER; note = 2'-O-methyladenosine-3'-phosphate
  modified_base 20: mod_base = OTHER; note = 2'-deoxyadenosine-3'-phosphate ((2S,4R)-1-[29-[[2-(acetylamino)-2-deoxy-beta-D-galactopyra nosyl]oxy]-14,14-bis[[3-[[3-[[5-[[2-(acetylamino)-2-deoxy-b eta-D-galactopyranosyl]oxy]-1-oxopentyl]amino]propyl]amino] -3-oxopropoxy]methyl]-1,12,19,25-tetraoxo-16-oxa-13,20,24-t riazanonacos-1-yl]-4-hydroxy-2-pyrrolidinyl)methyl ester
  misc_feature 1..19: note = RNA
  misc_feature 20: note = DNA
gttaanacnatttacttcaa

SEQ ID NO: 82 - DNA, 20 bp, synthetic construct
  source 1..20: mol_type = other DNA
  modified_base 1: mod_base = OTHER; note = 2'-O-methylguanosine-3'-phosphorothioate
  modified_base 2: mod_base = OTHER; note = 2'-O-methyluridine-3'-phosphorothioate
  modified_base 3: mod_base = OTHER; note = 2'-O-methyluridine-3'-phosphorothioate
  modified_base 4: mod_base = OTHER; note = 2'-O-methyladenosine-3'-phosphorothioate
  modified_base 5: mod_base = OTHER; note = 2'-O-methyladenosine-3'-phosphorothioate
  modified_base 6: mod_base = OTHER; note = 2'-O-methylcytidine-3'-phosphorothioate
  modified_base 7: mod_base = OTHER; note = 2'-O-methyladenosine-3'-phosphorothioate
  modified_base 8: mod_base = OTHER; note = 2'-O-methylcytidine-3'-phosphorothioate
  modified_base 9: mod_base = OTHER; note = 2'-O-methylcytidine-3'-phosphorothioate
  modified_base 10: mod_base = OTHER; note = 2'-O-methyladenosine-3'-phosphorothioate
  modified_base 11: mod_base = OTHER; note = 2'-O-methyluridine-3'-phosphorothioate
  modified_base 12: mod_base = OTHER; note = 2'-O-methyluridine-3'-phosphorothioate
  modified_base 13: mod_base = OTHER; note = 2'-O-methyluridine-3'-phosphorothioate
  modified_base 14: mod_base = OTHER; note = 2'-O-methyladenosine-3'-phosphorothioate
  modified_base 15: mod_base = OTHER; note 1'-(9-(2-aminoethoxy)-1H-benzo[b]pyrimido[4,5-e][1,4]oxazin -2(3H)-on-3-yl)-1'-deoxy-2'-O-methyl-beta-ribofuranose 3'-phosphorothioate
  modified_base 16: mod_base = OTHER; note = 2'-O-methyluridine-3'-phosphorothioate
  modified_base 17: mod_base = OTHER; note = 2'-O-methyluridine-3'-phosphorothioate
  modified_base 18: mod_base = OTHER; note 1'-(9-(2-aminoethoxy)-1H-benzo[b]pyrimido[4,5-e][1,4]oxazin -2(3H)-on-3-yl)-1'-deoxy-2'-O-methyl-beta-ribofuranose 3'-phosphorothioate
  modified_base 19: mod_base = OTHER; note = 2'-O-methyladenosine-3'-phosphate
  modified_base 20: mod_base = OTHER; note = 2'-deoxyadenosine-3'-phosphate ((2S,4R)-1-[29-[[2-(acetylamino)-2-deoxy-beta-D-galactopyra nosyl]oxy]-14,14-bis[[3-[[3-[[5-[[2-(acetylamino)-2-deoxy-b eta-D-galactopyranosyl]oxy]-1-oxopentyl]amino]propyl]amino] -3-oxopropoxy]methyl]-1,12,19,25-tetraoxo-16-oxa-13,20,24-t riazanonacos-1-yl]-4-hydroxy-2-pyrrolidinyl)methyl ester
  misc_feature 1..19: note = RNA
  misc_feature 20: note = DNA
gttaacaccatttanttnaa

SEQ ID NO: 83 - DNA, 20 bp, synthetic construct
  source 1..20: mol_type = other DNA
  modified_base 1: mod_base = OTHER; note = 2'-O-methylguanosine-3'-phosphorothioate
  modified_base 2: mod_base = OTHER; note = 2'-O-methyluridine-3'-phosphorothioate
  modified_base 3: mod_base = OTHER; note = 2'-O-methyluridine-3'-phosphorothioate
  modified_base 4: mod_base = OTHER; note = 2'-O-methyladenosine-3'-phosphorothioate
  modified_base 5: mod_base = OTHER; note = 2'-O-methyladenosine-3'-phosphorothioate
  modified_base 6: mod_base = OTHER; note 1'-(9-(2-aminoethoxy)-1H-benzo[b]pyrimido[4,5-e][1,4]oxazin -2(3H)-on-3-yl)-1'-deoxy-2'-O-methyl-beta-ribofuranose 3'-phosphorothioate
  modified_base 7: mod_base = OTHER; note = 2'-O-methyladenosine-3'-phosphorothioate
  modified_base 8: mod_base = OTHER; note = 2'-O-methylcytidine-3'-phosphorothioate
  modified_base 9: mod_base = OTHER; note = 2'-O-methylcytidine-3'-phosphorothioate
  modified_base 10: mod_base = OTHER; note = 2'-O-methyladenosine-3'-phosphorothioate
  modified_base 11: mod_base = OTHER; note = 2'-O-methyluridine-3'-phosphorothioate
  modified_base 12: mod_base = OTHER; note = 2'-O-methyluridine-3'-phosphorothioate
  modified_base 13: mod_base = OTHER; note = 2'-O-methyluridine-3'-phosphorothioate
  modified_base 14: mod_base = OTHER; note = 2'-O-methyladenosine-3'-phosphorothioate
  modified_base 15: mod_base = OTHER; note = 2'-O-methylcytidine-3'-phosphorothioate
  modified_base 16: mod_base = OTHER; note = 2'-O-methyluridine-3'-phosphorothioate
  modified_base 17: mod_base = OTHER; note = 2'-O-methyluridine-3'-phosphorothioate
  modified_base 18: mod_base = OTHER; note = 2'-O-methylcytidine-3'-phosphorothioate
  modified_base 19: mod_base = OTHER; note = 2'-O-methyladenosine-3'-phosphate
  modified_base 20: mod_base = OTHER; note = 2'-deoxyadenosine-3'-phosphate ((2S,4R)-1-[29-[[2-(acetylamino)-2-deoxy-beta-D-galactopyra nosyl]oxy]-14,14-bis[[3-[[3-[[5-[[2-(acetylamino)-2-deoxy-b eta-D-galactopyranosyl]oxy]-1-oxopentyl]amino]propyl]amino] -3-oxopropoxy]methyl]-1,12,19,25-tetraoxo-16-oxa-13,20,24-t riazanonacos-1-yl]-4-hydroxy-2-pyrrolidinyl)methyl ester
  misc_feature 1..19: note = RNA
  misc_feature 20: note = DNA
gttaanaccatttacttcaa

SEQ ID NO: 84 - DNA, 20 bp, synthetic construct
  source 1..20: mol_type = other DNA
  modified_base 1: mod_base = OTHER; note = 2'-O-methylguanosine-3'-phosphorothioate
  modified_base 2: mod_base = OTHER; note = 2'-O-methyluridine-3'-phosphorothioate
  modified_base 3: mod_base = OTHER; note = 2'-O-methyluridine-3'-phosphorothioate
  modified_base 4: mod_base = OTHER; note = 2'-O-methyladenosine-3'-phosphorothioate
  modified_base 5: mod_base = OTHER; note = 2'-O-methyladenosine-3'-phosphorothioate
  modified_base 6: mod_base = OTHER; note = 2'-O-methylcytidine-3'-phosphorothioate
  modified_base 7: mod_base = OTHER; note = 2'-O-methyladenosine-3'-phosphorothioate
  modified_base 8: mod_base = OTHER; note 1'-(9-(2-aminoethoxy)-1H-benzo[b]pyrimido[4,5-e][1,4]oxazin -2(3H)-on-3-yl)-1'-deoxy-2'-O-methyl-beta-ribofuranose 3'-phosphorothioate
  modified_base 9: mod_base = OTHER; note = 2'-O-methylcytidine-3'-phosphorothioate
  modified_base 10: mod_base = OTHER; note = 2'-O-methyladenosine-3'-phosphorothioate
  modified_base 11: mod_base = OTHER; note = 2'-O-methyluridine-3'-phosphorothioate
  modified_base 12: mod_base = OTHER; note = 2'-O-methyluridine-3'-phosphorothioate
  modified_base 13: mod_base = OTHER; note = 2'-O-methyluridine-3'-phosphorothioate
  modified_base 14: mod_base = OTHER; note = 2'-O-methyladenosine-3'-phosphorothioate
  modified_base 15: mod_base = OTHER; note = 2'-O-methylcytidine-3'-phosphorothioate
  modified_base 16: mod_base = OTHER; note = 2'-O-methyluridine-3'-phosphorothioate
  modified_base 17: mod_base = OTHER; note = 2'-O-methyluridine-3'-phosphorothioate
  modified_base 18: mod_base = OTHER; note = 2'-O-methylcytidine-3'-phosphorothioate
  modified_base 19: mod_base = OTHER; note = 2'-O-methyladenosine-3'-phosphate
  modified_base 20: mod_base = OTHER; note = 2'-deoxyadenosine-3'-phosphate ((2S,4R)-1-[29-[[2-(acetylamino)-2-deoxy-beta-D-galactopyra nosyl]oxy]-14,14-bis[[3-[[3-[[5-[[2-(acetylamino)-2-deoxy-b eta-D-galactopyranosyl]oxy]-1-oxopentyl]amino]propyl]amino] -3-oxopropoxy]methyl]-1,12,19,25-tetraoxo-16-oxa-13,20,24-t riazanonacos-1-yl]-4-hydroxy-2-pyrrolidinyl)methyl ester
  misc_feature 1..19: note = RNA
  misc_feature 20: note = DNA
gttaacancatttacttcaa

SEQ ID NO: 85 - DNA, 20 bp, synthetic construct
  source 1..20: mol_type = other DNA
  modified_base 1: mod_base = OTHER; note = 2'-O-methylguanosine-3'-phosphorothioate
  modified_base 2: mod_base = OTHER; note = 2'-O-methyluridine-3'-phosphorothioate
  modified_base 3: mod_base = OTHER; note = 2'-O-methyluridine-3'-phosphorothioate
  modified_base 4: mod_base = OTHER; note = 2'-O-methyladenosine-3'-phosphorothioate
  modified_base 5: mod_base = OTHER; note = 2'-O-methyladenosine-3'-phosphorothioate
  modified_base 6: mod_base = OTHER; note = 2'-O-methylcytidine-3'-phosphorothioate
  modified_base 7: mod_base = OTHER; note = 2'-O-methyladenosine-3'-phosphorothioate
  modified_base 8: mod_base = OTHER; note = 2'-O-methylcytidine-3'-phosphorothioate
  modified_base 9: mod_base = OTHER; note 1'-(9-(2-aminoethoxy)-1H-benzo[b]pyrimido[4,5-e][1,4]oxazin -2(3H)-on-3-yl)-1'-deoxy-2'-O-methyl-beta-ribofuranose 3'-phosphorothioate
  modified_base 10: mod_base = OTHER; note = 2'-O-methyladenosine-3'-phosphorothioate
  modified_base 11: mod_base = OTHER; note = 2'-O-methyluridine-3'-phosphorothioate
  modified_base 12: mod_base = OTHER; note = 2'-O-methyluridine-3'-phosphorothioate
  modified_base 13: mod_base = OTHER; note = 2'-O-methyluridine-3'-phosphorothioate
  modified_base 14: mod_base = OTHER; note = 2'-O-methyladenosine-3'-phosphorothioate
  modified_base 15: mod_base = OTHER; note = 2'-O-methylcytidine-3'-phosphorothioate
  modified_base 16: mod_base = OTHER; note = 2'-O-methyluridine-3'-phosphorothioate
  modified_base 17: mod_base = OTHER; note = 2'-O-methyluridine-3'-phosphorothioate
  modified_base 18: mod_base = OTHER; note = 2'-O-methylcytidine-3'-phosphorothioate
  modified_base 19: mod_base = OTHER; note = 2'-O-methyladenosine-3'-phosphate
  modified_base 20: mod_base = OTHER; note = 2'-deoxyadenosine-3'-phosphate ((2S,4R)-1-[29-[[2-(acetylamino)-2-deoxy-beta-D-galactopyra nosyl]oxy]-14,14-bis[[3-[[3-[[5-[[2-(acetylamino)-2-deoxy-b eta-D-galactopyranosyl]oxy]-1-oxopentyl]amino]propyl]amino] -3-oxopropoxy]methyl]-1,12,19,25-tetraoxo-16-oxa-13,20,24-t riazanonacos-1-yl]-4-hydroxy-2-pyrrolidinyl)methyl ester
  misc_feature 1..19: note = RNA
  misc_feature 20: note = DNA
gttaacacnatttacttcaa

SEQ ID NO: 86 - DNA, 20 bp, synthetic construct
  source 1..20: mol_type = other DNA
  modified_base 1: mod_base = OTHER; note = 2'-O-methylguanosine-3'-phosphorothioate
  modified_base 2: mod_base = OTHER; note = 2'-O-methyluridine-3'-phosphorothioate
  modified_base 3: mod_base = OTHER; note = 2'-O-methyluridine-3'-phosphorothioate
  modified_base 4: mod_base = OTHER; note = 2'-O-methyladenosine-3'-phosphorothioate
  modified_base 5: mod_base = OTHER; note = 2'-O-methyladenosine-3'-phosphorothioate
  modified_base 6: mod_base = OTHER; note = 2'-O-methylcytidine-3'-phosphorothioate
  modified_base 7: mod_base = OTHER; note = 2'-O-methyladenosine-3'-phosphorothioate
  modified_base 8: mod_base = OTHER; note = 2'-O-methylcytidine-3'-phosphorothioate
  modified_base 9: mod_base = OTHER; note = 2'-O-methylcytidine-3'-phosphorothioate
  modified_base 10: mod_base = OTHER; note = 2'-O-methyladenosine-3'-phosphorothioate
  modified_base 11: mod_base = OTHER; note = 2'-O-methyluridine-3'-phosphorothioate
  modified_base 12: mod_base = OTHER; note = 2'-O-methyluridine-3'-phosphorothioate
  modified_base 13: mod_base = OTHER; note = 2'-O-methyluridine-3'-phosphorothioate
  modified_base 14: mod_base = OTHER; note = 2'-O-methyladenosine-3'-phosphorothioate
  modified_base 15: mod_base = OTHER; note 1'-(9-(2-aminoethoxy)-1H-benzo[b]pyrimido[4,5-e][1,4]oxazin -2(3H)-on-3-yl)-1'-deoxy-2'-O-methyl-beta-ribofuranose 3'-phosphorothioate
  modified_base 16: mod_base = OTHER; note = 2'-O-methyluridine-3'-phosphorothioate
  modified_base 17: mod_base = OTHER; note = 2'-O-methyluridine-3'-phosphorothioate
  modified_base 18: mod_base = OTHER; note = 2'-O-methylcytidine-3'-phosphorothioate
  modified_base 19: mod_base = OTHER; note = 2'-O-methyladenosine-3'-phosphate
  modified_base 20: mod_base = OTHER; note = 2'-deoxyadenosine-3'-phosphate ((2S,4R)-1-[29-[[2-(acetylamino)-2-deoxy-beta-D-galactopyra nosyl]oxy]-14,14-bis[[3-[[3-[[5-[[2-(acetylamino)-2-deoxy-b eta-D-galactopyranosyl]oxy]-1-oxopentyl]amino]propyl]amino] -3-oxopropoxy]methyl]-1,12,19,25-tetraoxo-16-oxa-13,20,24-t riazanonacos-1-yl]-4-hydroxy-2-pyrrolidinyl)methyl ester
  misc_feature 1..19: note = RNA
  misc_feature 20: note = DNA
gttaacaccatttanttcaa

SEQ ID NO: 87 - DNA, 20 bp, synthetic construct
  source 1..20: mol_type = other DNA
  modified_base 1: mod_base = OTHER; note = 2'-O-methylguanosine-3'-phosphorothioate
  modified_base 2: mod_base = OTHER; note = 2'-O-methyluridine-3'-phosphorothioate
  modified_base 3: mod_base = OTHER; note = 2'-O-methyluridine-3'-phosphorothioate
  modified_base 4: mod_base = OTHER; note = 2'-O-methyladenosine-3'-phosphorothioate
  modified_base 5: mod_base = OTHER; note = 2'-O-methyladenosine-3'-phosphorothioate
  modified_base 6: mod_base = OTHER; note = 2'-O-methylcytidine-3'-phosphorothioate
  modified_base 7: mod_base = OTHER; note = 2'-O-methyladenosine-3'-phosphorothioate
  modified_base 8: mod_base = OTHER; note = 2'-O-methylcytidine-3'-phosphorothioate
  modified_base 9: mod_base = OTHER; note = 2'-O-methylcytidine-3'-phosphorothioate
  modified_base 10: mod_base = OTHER; note = 2'-O-methyladenosine-3'-phosphorothioate
  modified_base 11: mod_base = OTHER; note = 2'-O-methyluridine-3'-phosphorothioate
  modified_base 12: mod_base = OTHER; note = 2'-O-methyluridine-3'-phosphorothioate
  modified_base 13: mod_base = OTHER; note = 2'-O-methyluridine-3'-phosphorothioate
  modified_base 14: mod_base = OTHER; note = 2'-O-methyladenosine-3'-phosphorothioate
  modified_base 15: mod_base = OTHER; note = 2'-O-methylcytidine-3'-phosphorothioate
  modified_base 16: mod_base = OTHER; note = 2'-O-methyluridine-3'-phosphorothioate
  modified_base 17: mod_base = OTHER; note = 2'-O-methyluridine-3'-phosphorothioate
  modified_base 18: mod_base = OTHER; note 1'-(9-(2-aminoethoxy)-1H-benzo[b]pyrimido[4,5-e][1,4]oxazin -2(3H)-on-3-yl)-1'-deoxy-2'-O-methyl-beta-ribofuranose 3'-phosphorothioate
  modified_base 19: mod_base = OTHER; note = 2'-O-methyladenosine-3'-phosphate
  modified_base 20: mod_base = OTHER; note = 2'-deoxyadenosine-3'-phosphate ((2S,4R)-1-[29-[[2-(acetylamino)-2-deoxy-beta-D-galactopyra nosyl]oxy]-14,14-bis[[3-[[3-[[5-[[2-(acetylamino)-2-deoxy-b eta-D-galactopyranosyl]oxy]-1-oxopentyl]amino]propyl]amino] -3-oxopropoxy]methyl]-1,12,19,25-tetraoxo-16-oxa-13,20,24-t riazanonacos-1-yl]-4-hydroxy-2-pyrrolidinyl)methyl ester
  misc_feature 1..19: note = RNA
  misc_feature 20: note = DNA
gttaacaccatttacttnaa

SEQ ID NO: 88 - DNA, 20 bp, synthetic construct
  source 1..20: mol_type = other DNA
  modified_base 1: mod_base = OTHER; note = 2'-O-methylguanosine-3'-phosphorothioate
  modified_base 2: mod_base = OTHER; note = 2'-O-methyluridine-3'-phosphorothioate
  modified_base 3: mod_base = OTHER; note = 2'-O-methyluridine-3'-phosphorothioate
  modified_base 4: mod_base = OTHER; note = 2'-O-methyladenosine-3'-phosphorothioate
  modified_base 5: mod_base = OTHER; note = 2'-O-methyladenosine-3'-phosphorothioate
  modified_base 6: mod_base = OTHER; note 1'-(1H-benzo[b]pyrimido[4,5-e][1,4]oxazin-2(3H)-on-3-yl)-1' -deoxy-2'-O-methyl-beta-ribofuranose 3'-phosphorothioate
  modified_base 7: mod_base = OTHER; note = 2'-O-methyladenosine-3'-phosphorothioate
  modified_base 8: mod_base = OTHER; note = 2'-O-methylcytidine-3'-phosphorothioate
  modified_base 9: mod_base = OTHER; note 1'-(1H-benzo[b]pyrimido[4,5-e][1,4]oxazin-2(3H)-on-3-yl)-1' -deoxy-2'-O-methyl-beta-ribofuranose 3'-phosphorothioate
  modified_base 10: mod_base = OTHER; note = 2'-O-methyladenosine-3'-phosphorothioate
  modified_base 11: mod_base = OTHER; note = 2'-O-methyluridine-3'-phosphorothioate
  modified_base 12: mod_base = OTHER; note = 2'-O-methyluridine-3'-phosphorothioate
  modified_base 13: mod_base = OTHER; note = 2'-O-methyluridine-3'-phosphorothioate
  modified_base 14: mod_base = OTHER; note = 2'-O-methyladenosine-3'-phosphorothioate
  modified_base 15: mod_base = OTHER; note = 2'-O-methylcytidine-3'-phosphorothioate
  modified_base 16: mod_base = OTHER; note = 2'-O-methyluridine-3'-phosphorothioate
  modified_base 17: mod_base = OTHER; note = 2'-O-methyluridine-3'-phosphorothioate
  modified_base 18: mod_base = OTHER; note 1'-(1H-benzo[b]pyrimido[4,5-e][1,4]oxazin-2(3H)-on-3-yl)-1' -deoxy-2'-O-methyl-beta-ribofuranose 3'-phosphorothioate
  modified_base 19: mod_base = OTHER; note = 2'-O-methyladenosine-3'-phosphate
  modified_base 20: mod_base = OTHER; note = 2'-deoxyadenosine-3'-phosphate ((2S,4R)-1-[29-[[2-(acetylamino)-2-deoxy-beta-D-galactopyra nosyl]oxy]-14,14-bis[[3-[[3-[[5-[[2-(acetylamino)-2-deoxy-b eta-D-galactopyranosyl]oxy]-1-oxopentyl]amino]propyl]amino] -3-oxopropoxy]methyl]-1,12,19,25-tetraoxo-16-oxa-13,20,24-t riazanonacos-1-yl]-4-hydroxy-2-pyrrolidinyl)methyl ester
  misc_feature 1..19: note = RNA
  misc_feature 20: note = DNA
gttaanacnatttacttnaa

SEQ ID NO: 89 - DNA, 20 bp, synthetic construct
  source 1..20: mol_type = other DNA
  modified_base 1: mod_base = OTHER; note = 2'-O-methylguanosine-3'-phosphorothioate
  modified_base 2: mod_base = OTHER; note = 2'-O-methyluridine-3'-phosphorothioate
  modified_base 3: mod_base = OTHER; note = 2'-O-methyluridine-3'-phosphorothioate
  modified_base 4: mod_base = OTHER; note = 2'-O-methyladenosine-3'-phosphorothioate
  modified_base 5: mod_base = OTHER; note = 2'-O-methyladenosine-3'-phosphorothioate
  modified_base 6: mod_base = OTHER; note 1'-(1H-benzo[b]pyrimido[4,5-e][1,4]oxazin-2(3H)-on-3-yl)-1' -deoxy-2'-O-methyl-beta-ribofuranose 3'-phosphorothioate
  modified_base 7: mod_base = OTHER; note = 2'-O-methyladenosine-3'-phosphorothioate
  modified_base 8: mod_base = OTHER; note = 2'-O-methylcytidine-3'-phosphorothioate
  modified_base 9: mod_base = OTHER; note = 2'-O-methylcytidine-3'-phosphorothioate
  modified_base 10: mod_base = OTHER; note = 2'-O-methyladenosine-3'-phosphorothioate
  modified_base 11: mod_base = OTHER; note = 2'-O-methyluridine-3'-phosphorothioate
  modified_base 12: mod_base = OTHER; note = 2'-O-methyluridine-3'-phosphorothioate
  modified_base 13: mod_base = OTHER; note = 2'-O-methyluridine-3'-phosphorothioate
  modified_base 14: mod_base = OTHER; note = 2'-O-methyladenosine-3'-phosphorothioate
  modified_base 15: mod_base = OTHER; note 1'-(1H-benzo[b]pyrimido[4,5-e][1,4]oxazin-2(3H)-on-3-yl)-1' -deoxy-2'-O-methyl-beta-ribofuranose 3'-phosphorothioate
  modified_base 16: mod_base = OTHER; note = 2'-O-methyluridine-3'-phosphorothioate
  modified_base 17: mod_base = OTHER; note = 2'-O-methyluridine-3'-phosphorothioate
  modified_base 18: mod_base = OTHER; note 1'-(1H-benzo[b]pyrimido[4,5-e][1,4]oxazin-2(3H)-on-3-yl)-1' -deoxy-2'-O-methyl-beta-ribofuranose 3'-phosphorothioate
  modified_base 19: mod_base = OTHER; note = 2'-O-methyladenosine-3'-phosphate
  modified_base 20: mod_base = OTHER; note = 2'-deoxyadenosine-3'-phosphate ((2S,4R)-1-[29-[[2-(acetylamino)-2-deoxy-beta-D-galactopyra nosyl]oxy]-14,14-bis[[3-[[3-[[5-[[2-(acetylamino)-2-deoxy-b eta-D-galactopyranosyl]oxy]-1-oxopentyl]amino]propyl]amino] -3-oxopropoxy]methyl]-1,12,19,25-tetraoxo-16-oxa-13,20,24-t riazanonacos-1-yl]-4-hydroxy-2-pyrrolidinyl)methyl ester
  misc_feature 1..19: note = RNA
  misc_feature 20: note = DNA
gttaanaccatttanttnaa

SEQ ID NO: 90 - DNA, 20 bp, synthetic construct
  source 1..20: mol_type = other DNA
  modified_base 1: mod_base = OTHER; note = 2'-O-methylguanosine-3'-phosphorothioate
  modified_base 2: mod_base = OTHER; note = 2'-O-methyluridine-3'-phosphorothioate
  modified_base 3: mod_base = OTHER; note = 2'-O-methyluridine-3'-phosphorothioate
  modified_base 4: mod_base = OTHER; note = 2'-O-methyladenosine-3'-phosphorothioate
  modified_base 5: mod_base = OTHER; note = 2'-O-methyladenosine-3'-phosphorothioate
  modified_base 6: mod_base = OTHER; note 1'-(1H-benzo[b]pyrimido[4,5-e][1,4]oxazin-2(3H)-on-3-yl)-1' -deoxy-2'-O-methyl-beta-ribofuranose 3'-phosphorothioate
  modified_base 7: mod_base = OTHER; note = 2'-O-methyladenosine-3'-phosphorothioate
  modified_base 8: mod_base = OTHER; note = 2'-O-methylcytidine-3'-phosphorothioate
  modified_base 9: mod_base = OTHER; note = 2'-O-methylcytidine-3'-phosphorothioate
  modified_base 10: mod_base = OTHER; note = 2'-O-methyladenosine-3'-phosphorothioate
  modified_base 11: mod_base = OTHER; note = 2'-O-methyluridine-3'-phosphorothioate
  modified_base 12: mod_base = OTHER; note = 2'-O-methyluridine-3'-phosphorothioate
  modified_base 13: mod_base = OTHER; note = 2'-O-methyluridine-3'-phosphorothioate
  modified_base 14: mod_base = OTHER; note = 2'-O-methyladenosine-3'-phosphorothioate
  modified_base 15: mod_base = OTHER; note = 2'-O-methylcytidine-3'-phosphorothioate
  modified_base 16: mod_base = OTHER; note = 2'-O-methyluridine-3'-phosphorothioate
  modified_base 17: mod_base = OTHER; note = 2'-O-methyluridine-3'-phosphorothioate
  modified_base 18: mod_base = OTHER; note 1'-(1H-benzo[b]pyrimido[4,5-e][1,4]oxazin-2(3H)-on-3-yl)-1' -deoxy-2'-O-methyl-beta-ribofuranose 3'-phosphorothioate
  modified_base 19: mod_base = OTHER; note = 2'-O-methyladenosine-3'-phosphate
  modified_base 20: mod_base = OTHER; note = 2'-deoxyadenosine-3'-phosphate ((2S,4R)-1-[29-[[2-(acetylamino)-2-deoxy-beta-D-galactopyra nosyl]oxy]-14,14-bis[[3-[[3-[[5-[[2-(acetylamino)-2-deoxy-b eta-D-galactopyranosyl]oxy]-1-oxopentyl]amino]propyl]amino] -3-oxopropoxy]methyl]-1,12,19,25-tetraoxo-16-oxa-13,20,24-t riazanonacos-1-yl]-4-hydroxy-2-pyrrolidinyl)methyl ester
  misc_feature 1..19: note = RNA
  misc_feature 20: note = DNA
gttaanaccatttacttnaa

SEQ ID NO: 91 - DNA, 20 bp, synthetic construct
  source 1..20: mol_type = other DNA
  modified_base 1: mod_base = OTHER; note = 2'-O-methylguanosine-3'-phosphorothioate
  modified_base 2: mod_base = OTHER; note = 2'-O-methyluridine-3'-phosphorothioate
  modified_base 3: mod_base = OTHER; note = 2'-O-methyluridine-3'-phosphorothioate
  modified_base 4: mod_base = OTHER; note = 2'-O-methyladenosine-3'-phosphorothioate
  modified_base 5: mod_base = OTHER; note = 2'-O-methyladenosine-3'-phosphorothioate
  modified_base 6: mod_base = OTHER; note 1'-(1H-benzo[b]pyrimido[4,5-e][1,4]oxazin-2(3H)-on-3-yl)-1' -deoxy-2'-O-methyl-beta-ribofuranose 3'-phosphorothioate
  modified_base 7: mod_base = OTHER; note = 2'-O-methyladenosine-3'-phosphorothioate
  modified_base 8: mod_base = OTHER; note = 2'-O-methylcytidine-3'-phosphorothioate
  modified_base 9: mod_base = OTHER; note = 2'-O-methylcytidine-3'-phosphorothioate
  modified_base 10: mod_base = OTHER; note = 2'-O-methyladenosine-3'-phosphorothioate
  modified_base 11: mod_base = OTHER; note = 2'-O-methyluridine-3'-phosphorothioate
  modified_base 12: mod_base = OTHER; note = 2'-O-methyluridine-3'-phosphorothioate
  modified_base 13: mod_base = OTHER; note = 2'-O-methyluridine-3'-phosphorothioate
  modified_base 14: mod_base = OTHER; note = 2'-O-methyladenosine-3'-phosphorothioate
  modified_base 15: mod_base = OTHER; note 1'-(1H-benzo[b]pyrimido[4,5-e][1,4]oxazin-2(3H)-on-3-yl)-1' -deoxy-2'-O-methyl-beta-ribofuranose 3'-phosphorothioate
  modified_base 16: mod_base = OTHER; note = 2'-O-methyluridine-3'-phosphorothioate
  modified_base 17: mod_base = OTHER; note = 2'-O-methyluridine-3'-phosphorothioate
  modified_base 18: mod_base = OTHER; note = 2'-O-methylcytidine-3'-phosphorothioate
  modified_base 19: mod_base = OTHER; note = 2'-O-methyladenosine-3'-phosphate
  modified_base 20: mod_base = OTHER; note = 2'-deoxyadenosine-3'-phosphate ((2S,4R)-1-[29-[[2-(acetylamino)-2-deoxy-beta-D-galactopyra nosyl]oxy]-14,14-bis[[3-[[3-[[5-[[2-(acetylamino)-2-deoxy-b eta-D-galactopyranosyl]oxy]-1-oxopentyl]amino]propyl]amino] -3-oxopropoxy]methyl]-1,12,19,25-tetraoxo-16-oxa-13,20,24-t riazanonacos-1-yl]-4-hydroxy-2-pyrrolidinyl)methyl ester
  misc_feature 1..19: note = RNA
  misc_feature 20: note = DNA
gttaanaccatttanttcaa

SEQ ID NO: 92 - DNA, 20 bp, synthetic construct
  source 1..20: mol_type = other DNA
  modified_base 1: mod_base = OTHER; note = 2'-O-methylguanosine-3'-phosphorothioate
  modified_base 2: mod_base = OTHER; note = 2'-O-methyluridine-3'-phosphorothioate
  modified_base 3: mod_base = OTHER; note = 2'-O-methyluridine-3'-phosphorothioate
  modified_base 4: mod_base = OTHER; note = 2'-O-methyladenosine-3'-phosphorothioate
  modified_base 5: mod_base = OTHER; note = 2'-O-methyladenosine-3'-phosphorothioate
  modified_base 6: mod_base = OTHER; note = 2'-O-methylcytidine-3'-phosphorothioate
  modified_base 7: mod_base = OTHER; note = 2'-O-methyladenosine-3'-phosphorothioate
  modified_base 8: mod_base = OTHER; note = 2'-O-methylcytidine-3'-phosphorothioate
  modified_base 9: mod_base = OTHER; note 1'-(1H-benzo[b]pyrimido[4,5-e][1,4]oxazin-2(3H)-on-3-yl)-1' -deoxy-2'-O-methyl-beta-ribofuranose 3'-phosphorothioate
  modified_base 10: mod_base = OTHER; note = 2'-O-methyladenosine-3'-phosphorothioate
  modified_base 11: mod_base = OTHER; note = 2'-O-methyluridine-3'-phosphorothioate
  modified_base 12: mod_base = OTHER; note = 2'-O-methyluridine-3'-phosphorothioate
  modified_base 13: mod_base = OTHER; note = 2'-O-methyluridine-3'-phosphorothioate
  modified_base 14: mod_base = OTHER; note = 2'-O-methyladenosine-3'-phosphorothioate
  modified_base 15: mod_base = OTHER; note 1'-(1H-benzo[b]pyrimido[4,5-e][1,4]oxazin-2(3H)-on-3-yl)-1' -deoxy-2'-O-methyl-beta-ribofuranose 3'-phosphorothioate
  modified_base 16: mod_base = OTHER; note = 2'-O-methyluridine-3'-phosphorothioate
  modified_base 17: mod_base = OTHER; note = 2'-O-methyluridine-3'-phosphorothioate
  modified_base 18: mod_base = OTHER; note = 2'-O-methylcytidine-3'-phosphorothioate
  modified_base 19: mod_base = OTHER; note = 2'-O-methyladenosine-3'-phosphate
  modified_base 20: mod_base = OTHER; note = 2'-deoxyadenosine-3'-phosphate ((2S,4R)-1-[29-[[2-(acetylamino)-2-deoxy-beta-D-galactopyra nosyl]oxy]-14,14-bis[[3-[[3-[[5-[[2-(acetylamino)-2-deoxy-b eta-D-galactopyranosyl]oxy]-1-oxopentyl]amino]propyl]amino] -3-oxopropoxy]methyl]-1,12,19,25-tetraoxo-16-oxa-13,20,24-t riazanonacos-1-yl]-4-hydroxy-2-pyrrolidinyl)methyl ester
  misc_feature 1..19: note = RNA
  misc_feature 20: note = DNA
gttaacacnatttanttcaa

SEQ ID NO: 93 - DNA, 20 bp, synthetic construct
  source 1..20: mol_type = other DNA
  modified_base 1: mod_base = OTHER; note = 2'-O-methylguanosine-3'-phosphorothioate
  modified_base 2: mod_base = OTHER; note = 2'-O-methyluridine-3'-phosphorothioate
  modified_base 3: mod_base = OTHER; note = 2'-O-methyluridine-3'-phosphorothioate
  modified_base 4: mod_base = OTHER; note = 2'-O-methyladenosine-3'-phosphorothioate
  modified_base 5: mod_base = OTHER; note = 2'-O-methyladenosine-3'-phosphorothioate
  modified_base 6: mod_base = OTHER; note 1'-(1H-benzo[b]pyrimido[4,5-e][1,4]oxazin-2(3H)-on-3-yl)-1' -deoxy-2'-O-methyl-beta-ribofuranose 3'-phosphorothioate
  modified_base 7: mod_base = OTHER; note = 2'-O-methyladenosine-3'-phosphorothioate
  modified_base 8: mod_base = OTHER; note 1'-(1H-benzo[b]pyrimido[4,5-e][1,4]oxazin-2(3H)-on-3-yl)-1' -deoxy-2'-O-methyl-beta-ribofuranose 3'-phosphorothioate
  modified_base 9: mod_base = OTHER; note = 2'-O-methylcytidine-3'-phosphorothioate
  modified_base 10: mod_base = OTHER; note = 2'-O-methyladenosine-3'-phosphorothioate
  modified_base 11: mod_base = OTHER; note = 2'-O-methyluridine-3'-phosphorothioate
  modified_base 12: mod_base = OTHER; note = 2'-O-methyluridine-3'-phosphorothioate
  modified_base 13: mod_base = OTHER; note = 2'-O-methyluridine-3'-phosphorothioate
  modified_base 14: mod_base = OTHER; note = 2'-O-methyladenosine-3'-phosphorothioate
  modified_base 15: mod_base = OTHER; note = 2'-O-methylcytidine-3'-phosphorothioate
  modified_base 16: mod_base = OTHER; note = 2'-O-methyluridine-3'-phosphorothioate
  modified_base 17: mod_base = OTHER; note = 2'-O-methyluridine-3'-phosphorothioate
  modified_base 18: mod_base = OTHER; note = 2'-O-methylcytidine-3'-phosphorothioate
  modified_base 19: mod_base = OTHER; note = 2'-O-methyladenosine-3'-phosphate
  modified_base 20: mod_base = OTHER; note = 2'-deoxyadenosine-3'-phosphate ((2S,4R)-1-[29-[[2-(acetylamino)-2-deoxy-beta-D-galactopyra nosyl]oxy]-14,14-bis[[3-[[3-[[5-[[2-(acetylamino)-2-deoxy-b eta-D-galactopyranosyl]oxy]-1-oxopentyl]amino]propyl]amino] -3-oxopropoxy]methyl]-1,12,19,25-tetraoxo-16-oxa-13,20,24-t riazanonacos-1-yl]-4-hydroxy-2-pyrrolidinyl)methyl ester
  misc_feature 1..19: note = RNA
  misc_feature 20: note = DNA
gttaanancatttacttcaa

SEQ ID NO: 94 - DNA, 20 bp, synthetic construct
  source 1..20: mol_type = other DNA
  modified_base 1: mod_base = OTHER; note = 2'-O-methylguanosine-3'-phosphorothioate
  modified_base 2: mod_base = OTHER; note = 2'-O-methyluridine-3'-phosphorothioate
  modified_base 3: mod_base = OTHER; note = 2'-O-methyluridine-3'-phosphorothioate
  modified_base 4: mod_base = OTHER; note = 2'-O-methyladenosine-3'-phosphorothioate
  modified_base 5: mod_base = OTHER; note = 2'-O-methyladenosine-3'-phosphorothioate
  modified_base 6: mod_base = OTHER; note = 2'-O-methylcytidine-3'-phosphorothioate
  modified_base 7: mod_base = OTHER; note = 2'-O-methyladenosine-3'-phosphorothioate
  modified_base 8: mod_base = OTHER; note = 2'-O-methylcytidine-3'-phosphorothioate
  modified_base 9: mod_base = OTHER; note = 2'-O-methylcytidine-3'-phosphorothioate
  modified_base 10: mod_base = OTHER; note = 2'-O-methyladenosine-3'-phosphorothioate
  modified_base 11: mod_base = OTHER; note = 2'-O-methyluridine-3'-phosphorothioate
  modified_base 12: mod_base = OTHER; note = 2'-O-methyluridine-3'-phosphorothioate
  modified_base 13: mod_base = OTHER; note = 2'-O-methyluridine-3'-phosphorothioate
  modified_base 14: mod_base = OTHER; note = 2'-O-methyladenosine-3'-phosphorothioate
  modified_base 15: mod_base = OTHER; note 1'-(1H-benzo[b]pyrimido[4,5-e][1,4]oxazin-2(3H)-on-3-yl)-1' -deoxy-2'-O-methyl-beta-ribofuranose 3'-phosphorothioate
  modified_base 16: mod_base = OTHER; note = 2'-O-methyluridine-3'-phosphorothioate
  modified_base 17: mod_base = OTHER; note = 2'-O-methyluridine-3'-phosphorothioate
  modified_base 18: mod_base = OTHER; note 1'-(1H-benzo[b]pyrimido[4,5-e][1,4]oxazin-2(3H)-on-3-yl)-1' -deoxy-2'-O-methyl-beta-ribofuranose 3'-phosphorothioate
  modified_base 19: mod_base = OTHER; note = 2'-O-methyladenosine-3'-phosphate
  modified_base 20: mod_base = OTHER; note = 2'-deoxyadenosine-3'-phosphate ((2S,4R)-1-[29-[[2-(acetylamino)-2-deoxy-beta-D-galactopyra nosyl]oxy]-14,14-bis[[3-[[3-[[5-[[2-(acetylamino)-2-deoxy-b eta-D-galactopyranosyl]oxy]-1-oxopentyl]amino]propyl]amino] -3-oxopropoxy]methyl]-1,12,19,25-tetraoxo-16-oxa-13,20,24-t riazanonacos-1-yl]-4-hydroxy-2-pyrrolidinyl)methyl ester
  misc_feature 1..19: note = RNA
  misc_feature 20: note = DNA
gttaacaccatttanttnaa

SEQ ID NO: 95 - DNA, 20 bp, synthetic construct
  source 1..20: mol_type = other DNA
  modified_base 1: mod_base = OTHER; note = 2'-O-methylguanosine-3'-phosphorothioate
  modified_base 2: mod_base = OTHER; note = 2'-O-methyluridine-3'-phosphorothioate
  modified_base 3: mod_base = OTHER; note = 2'-O-methyluridine-3'-phosphorothioate
  modified_base 4: mod_base = OTHER; note = 2'-O-methyladenosine-3'-phosphorothioate
  modified_base 5: mod_base = OTHER; note = 2'-O-methyladenosine-3'-phosphorothioate
  modified_base 6: mod_base = OTHER; note 1'-(1H-benzo[b]pyrimido[4,5-e][1,4]oxazin-2(3H)-on-3-yl)-1' ,2'-di(deoxy)-2'-fluoro-beta-ribofuranose 3'-phosphorothioate
  modified_base 7: mod_base = OTHER; note = 2'-O-methyladenosine-3'-phosphorothioate
  modified_base 8: mod_base = OTHER; note = 2'-O-methylcytidine-3'-phosphorothioate
  modified_base 9: mod_base = OTHER; note = 2'-O-methylcytidine-3'-phosphorothioate
  modified_base 10: mod_base = OTHER; note = 2'-O-methyladenosine-3'-phosphorothioate
  modified_base 11: mod_base = OTHER; note = 2'-O-methyluridine-3'-phosphorothioate
  modified_base 12: mod_base = OTHER; note = 2'-O-methyluridine-3'-phosphorothioate
  modified_base 13: mod_base = OTHER; note = 2'-O-methyluridine-3'-phosphorothioate
  modified_base 14: mod_base = OTHER; note = 2'-O-methyladenosine-3'-phosphorothioate
  modified_base 15: mod_base = OTHER; note 1'-(1H-benzo[b]pyrimido[4,5-e][1,4]oxazin-2(3H)-on-3-yl)-1' ,2'-di(deoxy)-2'-fluoro-beta-ribofuranose 3'-phosphorothioate
  modified_base 16: mod_base = OTHER; note = 2'-O-methyluridine-3'-phosphorothioate
  modified_base 17: mod_base = OTHER; note = 2'-O-methyluridine-3'-phosphorothioate
  modified_base 18: mod_base = OTHER; note 1'-(1H-benzo[b]pyrimido[4,5-e][1,4]oxazin-2(3H)-on-3-yl)-1' ,2'-di(deoxy)-2'-fluoro-beta-ribofuranose 3'-phosphorothioate
  modified_base 19: mod_base = OTHER; note = 2'-O-methyladenosine-3'-phosphate
  modified_base 20: mod_base = OTHER; note = 2'-deoxyadenosine-3'-phosphate ((2S,4R)-1-[29-[[2-(acetylamino)-2-deoxy-beta-D-galactopyra nosyl]oxy]-14,14-bis[[3-[[3-[[5-[[2-(acetylamino)-2-deoxy-b eta-D-galactopyranosyl]oxy]-1-oxopentyl]amino]propyl]amino] -3-oxopropoxy]methyl]-1,12,19,25-tetraoxo-16-oxa-13,20,24-t riazanonacos-1-yl]-4-hydroxy-2-pyrrolidinyl)methyl ester
  misc_feature 1..19: note = RNA
  misc_feature 20: note = DNA
gttaanaccatttanttnaa

SEQ ID NO: 96 - DNA, 20 bp, synthetic construct
  source 1..20: mol_type = other DNA
  modified_base 1: mod_base = OTHER; note = 2'-O-methylguanosine-3'-phosphorothioate
  modified_base 2: mod_base = OTHER; note = 2'-O-methyluridine-3'-phosphorothioate
  modified_base 3: mod_base = OTHER; note = 2'-O-methyluridine-3'-phosphate
  modified_base 4: mod_base = OTHER; note = 2'-O-methyladenosine-3'-phosphate
  modified_base 5: mod_base = OTHER; note = 2'-O-methyladenosine-3'-phosphate
  modified_base 6: mod_base = OTHER; note = 2'-O-methylcytidine-3'-phosphate
  modified_base 7: mod_base = OTHER; note = 2'-O-methyladenosine-3'-phosphate
  modified_base 8: mod_base = OTHER; note = 2'-O-methylcytidine-3'-phosphate
  modified_base 9: mod_base = OTHER; note = 2'-O-methylcytidine-3'-phosphate
  modified_base 10: mod_base = OTHER; note = 2'-O-methyladenosine-3'-phosphate
  modified_base 11: mod_base = OTHER; note = 2'-O-methyluridine-3'-phosphate
  modified_base 12: mod_base = OTHER; note = 2'-O-methyluridine-3'-phosphate
  modified_base 13: mod_base = OTHER; note = 2'-O-methyluridine-3'-phosphate
  modified_base 14: mod_base = OTHER; note = 2'-O-methyladenosine-3'-phosphate
  modified_base 15: mod_base = OTHER; note = 2'-O-methylcytidine-3'-phosphate
  modified_base 16: mod_base = OTHER; note = 2'-O-methyluridine-3'-phosphate
  modified_base 17: mod_base = OTHER; note = 2'-O-methyluridine-3'-phosphorothioate
  modified_base 18: mod_base = OTHER; note = 2'-O-methylcytidine-3'-phosphorothioate
  modified_base 19: mod_base = OTHER; note = 2'-O-methyladenosine-3'-phosphate
  modified_base 20: mod_base = OTHER; note = 2'-deoxyadenosine-3'-phosphate ((2S,4R)-1-[29-[[2-(acetylamino)-2-deoxy-beta-D-galactopyra nosyl]oxy]-14,14-bis[[3-[[3-[[5-[[2-(acetylamino)-2-deoxy-b eta-D-galactopyranosyl]oxy]-1-oxopentyl]amino]propyl]amino] -3-oxopropoxy]methyl]-1,12,19,25-tetraoxo-16-oxa-13,20,24-t riazanonacos-1-yl]-4-hydroxy-2-pyrrolidinyl)methyl ester
  misc_feature 1..19: note = RNA
  misc_feature 20: note = DNA
gttaacaccatttacttcaa

SEQ ID NO: 97 - DNA, 20 bp, synthetic construct
  source 1..20: mol_type = other DNA
  modified_base 1: mod_base = OTHER; note = 2'-O-methylguanosine-3'-phosphorothioate
  modified_base 2: mod_base = OTHER; note = 2'-deoxy-2'-fluorouridine-3'-phosphorothioate
  modified_base 3: mod_base = OTHER; note = 2'-O-methyluridine-3'-phosphorothioate
  modified_base 4: mod_base = OTHER; note = 2'-deoxy-2'-fluoroadenosine-3'-phosphorothioate
  modified_base 5: mod_base = OTHER; note = 2'-O-methyladenosine-3'-phosphorothioate
  modified_base 6: mod_base = OTHER; note = 2'-deoxy-2'-fluorocytidine-3'-phosphorothioate
  modified_base 7: mod_base = OTHER; note = 2'-O-methyladenosine-3'-phosphorothioate
  modified_base 8: mod_base = OTHER; note = 2'-deoxy-2'-fluorocytidine-3'-phosphorothioate
  modified_base 9: mod_base = OTHER; note = 2'-O-methylcytidine-3'-phosphorothioate
  modified_base 10: mod_base = OTHER; note = 2'-deoxy-2'-fluoroadenosine-3'-phosphorothioate
  modified_base 11: mod_base = OTHER; note = 2'-O-methyluridine-3'-phosphorothioate
  modified_base 12: mod_base = OTHER; note = 2'-deoxy-2'-fluorouridine-3'-phosphorothioate
  modified_base 13: mod_base = OTHER; note = 2'-O-methyluridine-3'-phosphorothioate
  modified_base 14: mod_base = OTHER; note = 2'-deoxy-2'-fluoroadenosine-3'-phosphorothioate
  modified_base 15: mod_base = OTHER; note = 2'-O-methylcytidine-3'-phosphorothioate
  modified_base 16: mod_base = OTHER; note = 2'-deoxy-2'-fluorouridine-3'-phosphorothioate
  modified_base 17: mod_base = OTHER; note = 2'-O-methyluridine-3'-phosphorothioate
  modified_base 18: mod_base = OTHER; note = 2'-deoxy-2'-fluorocytidine-3'-phosphorothioate
  modified_base 19: mod_base = OTHER; note = 2'-O-methyladenosine-3'-phosphate
  modified_base 20: mod_base = OTHER; note = 2'-deoxyadenosine-3'-phosphate ((2S,4R)-1-[29-[[2-(acetylamino)-2-deoxy-beta-D-galactopyra nosyl]oxy]-14,14-bis[[3-[[3-[[5-[[2-(acetylamino)-2-deoxy-b eta-D-galactopyranosyl]oxy]-1-oxopentyl]amino]propyl]amino] -3-oxopropoxy]methyl]-1,12,19,25-tetraoxo-16-oxa-13,20,24-t riazanonacos-1-yl]-4-hydroxy-2-pyrrolidinyl)methyl ester
  misc_feature 1..19: note = RNA
  misc_feature 20: note = DNA
gttaacaccatttacttcaa

SEQ ID NO: 98 - DNA, 20 bp, synthetic construct
  source 1..20: mol_type = other DNA
  modified_base 1: mod_base = OTHER; note = 2'-deoxy-2'-fluoroguanosine-3'-phosphorothioate
  modified_base 2: mod_base = OTHER; note = 2'-O-methyluridine-3'-phosphorothioate
  modified_base 3: mod_base = OTHER; note = 2'-deoxy-2'-fluorouridine-3'-phosphorothioate
  modified_base 4: mod_base = OTHER; note = 2'-O-methyladenosine-3'-phosphorothioate
  modified_base 5: mod_base = OTHER; note = 2'-deoxy-2'-fluoroadenosine-3'-phosphorothioate
  modified_base 6: mod_base = OTHER; note = 2'-O-methylcytidine-3'-phosphorothioate
  modified_base 7: mod_base = OTHER; note = 2'-deoxy-2'-fluoroadenosine-3'-phosphorothioate
  modified_base 8: mod_base = OTHER; note = 2'-O-methylcytidine-3'-phosphorothioate
  modified_base 9: mod_base = OTHER; note = 2'-O-methylcytidine-3'-phosphorothioate
  modified_base 10: mod_base = OTHER; note = 2'-O-methyladenosine-3'-phosphorothioate
  modified_base 11: mod_base = OTHER; note = 2'-deoxy-2'-fluorouridine-3'-phosphorothioate
  modified_base 12: mod_base = OTHER; note = 2'-O-methyluridine-3'-phosphorothioate
  modified_base 13: mod_base = OTHER; note = 2'-deoxy-2'-fluorouridine-3'-phosphorothioate
  modified_base 14: mod_base = OTHER; note = 2'-O-methyladenosine-3'-phosphorothioate
  modified_base 15: mod_base = OTHER; note = 2'-deoxy-2'-fluorocytidine-3'-phosphorothioate
  modified_base 16: mod_base = OTHER; note = 2'-O-methyluridine-3'-phosphorothioate
  modified_base 17: mod_base = OTHER; note = 2'-deoxy-2'-fluorouridine-3'-phosphorothioate
  modified_base 18: mod_base = OTHER; note = 2'-O-methylcytidine-3'-phosphorothioate
  modified_base 19: mod_base = OTHER; note = 2'-deoxy-2'-fluoroadenosine-3'-phosphate
  modified_base 20: mod_base = OTHER; note = 2'-deoxyadenosine-3'-phosphate ((2S,4R)-1-[29-[[2-(acetylamino)-2-deoxy-beta-D-galactopyra nosyl]oxy]-14,14-bis[[3-[[3-[[5-[[2-(acetylamino)-2-deoxy-b eta-D-galactopyranosyl]oxy]-1-oxopentyl]amino]propyl]amino] -3-oxopropoxy]methyl]-1,12,19,25-tetraoxo-16-oxa-13,20,24-t riazanonacos-1-yl]-4-hydroxy-2-pyrrolidinyl)methyl ester
  misc_feature 1..19: note = RNA
  misc_feature 20: note = DNA
gttaacaccatttacttcaa

SEQ ID NO: 99 - DNA, 20 bp, synthetic construct
  source 1..20: mol_type = other DNA
  modified_base 1: mod_base = OTHER; note = 2'-O-methylguanosine-3'-phosphorothioate
  modified_base 2: mod_base = OTHER; note = 2'-deoxy-2'-fluorouridine-3'-phosphorothioate
  modified_base 3: mod_base = OTHER; note = 2'-O-methyluridine-3'-phosphorothioate
  modified_base 4: mod_base = OTHER; note = 2'-deoxy-2'-fluoroadenosine-3'-phosphorothioate
  modified_base 5: mod_base = OTHER; note = 2'-O-methyladenosine-3'-phosphorothioate
  modified_base 6: mod_base = OTHER; note = 2'-deoxy-2'-fluorocytidine-3'-phosphorothioate
  modified_base 7: mod_base = OTHER; note = 2'-O-methyladenosine-3'-phosphorothioate
  modified_base 8: mod_base = OTHER; note = 2'-deoxy-2'-fluorocytidine-3'-phosphorothioate
  modified_base 9: mod_base = OTHER; note = 2'-O-methylcytidine-3'-phosphorothioate
  modified_base 10: mod_base = OTHER; note = 2'-O-methyladenosine-3'-phosphorothioate
  modified_base 11: mod_base = OTHER; note = 2'-O-methyluridine-3'-phosphorothioate
  modified_base 12: mod_base = OTHER; note = 2'-deoxy-2'-fluorouridine-3'-phosphorothioate
  modified_base 13: mod_base = OTHER; note = 2'-O-methyluridine-3'-phosphorothioate
  modified_base 14: mod_base = OTHER; note = 2'-deoxy-2'-fluoroadenosine-3'-phosphorothioate
  modified_base 15: mod_base = OTHER; note = 2'-O-methylcytidine-3'-phosphorothioate
  modified_base 16: mod_base = OTHER; note = 2'-deoxy-2'-fluorouridine-3'-phosphorothioate
  modified_base 17: mod_base = OTHER; note = 2'-O-methyluridine-3'-phosphorothioate
  modified_base 18: mod_base = OTHER; note = 2'-deoxy-2'-fluorocytidine-3'-phosphorothioate
  modified_base 19: mod_base = OTHER; note = 2'-O-methyladenosine-3'-phosphate
  modified_base 20: mod_base = OTHER; note = 2'-deoxyadenosine-3'-phosphate ((2S,4R)-1-[29-[[2-(acetylamino)-2-deoxy-beta-D-galactopyra nosyl]oxy]-14,14-bis[[3-[[3-[[5-[[2-(acetylamino)-2-deoxy-b eta-D-galactopyranosyl]oxy]-1-oxopentyl]amino]propyl]amino] -3-oxopropoxy]methyl]-1,12,19,25-tetraoxo-16-oxa-13,20,24-t riazanonacos-1-yl]-4-hydroxy-2-pyrrolidinyl)methyl ester
  misc_feature 1..19: note = RNA
  misc_feature 20: note = DNA
gttaacaccatttacttcaa

SEQ ID NO: 100 - DNA, 20 bp, synthetic construct
  source 1..20: mol_type = other DNA
  modified_base 1: mod_base = OTHER; note = 2'-O-methylguanosine-3'-phosphorothioate
  modified_base 2: mod_base = OTHER; note = 2'-deoxy-2'-fluorouridine-3'-phosphorothioate
  modified_base 3: mod_base = OTHER; note = 2'-O-methyluridine-3'-phosphate
  modified_base 4: mod_base = OTHER; note = 2'-deoxy-2'-fluoroadenosine-3'-phosphorothioate
  modified_base 5: mod_base = OTHER; note = 2'-O-methyladenosine-3'-phosphate
  modified_base 6: mod_base = OTHER; note = 2'-deoxy-2'-fluorocytidine-3'-phosphorothioate
  modified_base 7: mod_base = OTHER; note = 2'-O-methyladenosine-3'-phosphate
  modified_base 8: mod_base = OTHER; note = 2'-deoxy-2'-fluorocytidine-3'-phosphorothioate
  modified_base 9: mod_base = OTHER; note = 2'-O-methylcytidine-3'-phosphate
  modified_base 10: mod_base = OTHER; note = 2'-O-methyladenosine-3'-phosphorothioate
  modified_base 11: mod_base = OTHER; note = 2'-O-methyluridine-3'-phosphate
  modified_base 12: mod_base = OTHER; note = 2'-deoxy-2'-fluorouridine-3'-phosphorothioate
  modified_base 13: mod_base = OTHER; note = 2'-O-methyluridine-3'-phosphate
  modified_base 14: mod_base = OTHER; note = 2'-deoxy-2'-fluoroadenosine-3'-phosphorothioate
  modified_base 15: mod_base = OTHER; note = 2'-O-methylcytidine-3'-phosphate
  modified_base 16: mod_base = OTHER; note = 2'-deoxy-2'-fluorouridine-3'-phosphorothioate
  modified_base 17: mod_base = OTHER; note = 2'-O-methyluridine-3'-phosphorothioate
  modified_base 18: mod_base = OTHER; note = 2'-deoxy-2'-fluorocytidine-3'-phosphorothioate
  modified_base 19: mod_base = OTHER; note = 2'-O-methyladenosine-3'-phosphate
  modified_base 20: mod_base = OTHER; note = 2'-deoxyadenosine-3'-phosphate ((2S,4R)-1-[29-[[2-(acetylamino)-2-deoxy-beta-D-galactopyra nosyl]oxy]-14,14-bis[[3-[[3-[[5-[[2-(acetylamino)-2-deoxy-b eta-D-galactopyranosyl]oxy]-1-oxopentyl]amino]propyl]amino] -3-oxopropoxy]methyl]-1,12,19,25-tetraoxo-16-oxa-13,20,24-t riazanonacos-1-yl]-4-hydroxy-2-pyrrolidinyl)methyl ester
  misc_feature 1..19: note = RNA
  misc_feature 20: note = DNA
gttaacaccatttacttcaa

SEQ ID NO: 101 - DNA, 20 bp, synthetic construct
  source 1..20: mol_type = other DNA
  modified_base 1: mod_base = OTHER; note = 2'-O-methylguanosine-3'-phosphorothioate
  modified_base 2: mod_base = OTHER; note = 2'-O,4'-C-methylmethylene 5-methyluridine-3'-phosphorothioate
  modified_base 3: mod_base = OTHER; note = 2'-O-methyluridine-3'-phosphorothioate
  modified_base 4: mod_base = OTHER; note = 2'-deoxy-2'-fluoroadenosine-3'-phosphorothioate
  modified_base 5: mod_base = OTHER; note = 2'-O-methyladenosine-3'-phosphorothioate
  modified_base 6: mod_base = OTHER; note = 2'-O,4'-C-methylmethylene 5-methylcytidine-3'-phosphorothioate
  modified_base 7: mod_base = OTHER; note = 2'-O-methyladenosine-3'-phosphorothioate
  modified_base 8: mod_base = OTHER; note = 2'-deoxy-2'-fluorocytidine-3'-phosphorothioate
  modified_base 9: mod_base = OTHER; note = 2'-O-methylcytidine-3'-phosphorothioate
  modified_base 10: mod_base = OTHER; note = 2'-O-methyladenosine-3'-phosphorothioate
  modified_base 11: mod_base = OTHER; note = 2'-O-methyluridine-3'-phosphorothioate
  modified_base 12: mod_base = OTHER; note = 2'-deoxy-2'-fluorouridine-3'-phosphorothioate
  modified_base 13: mod_base = OTHER; note = 2'-O-methyluridine-3'-phosphorothioate
  modified_base 14: mod_base = OTHER; note = 2'-deoxy-2'-fluoroadenosine-3'-phosphorothioate
  modified_base 15: mod_base = OTHER; note = 2'-O-methylcytidine-3'-phosphorothioate
  modified_base 16: mod_base = OTHER; note = 2'-deoxy-2'-fluorouridine-3'-phosphorothioate
  modified_base 17: mod_base = OTHER; note = 2'-O-methyluridine-3'-phosphorothioate
  modified_base 18: mod_base = OTHER; note = 2'-deoxy-2'-fluorocytidine-3'-phosphorothioate
  modified_base 19: mod_base = OTHER; note = 2'-O-methyladenosine-3'-phosphate
  modified_base 20: mod_base = OTHER; note = 2'-deoxyadenosine-3'-phosphate ((2S,4R)-1-[29-[[2-(acetylamino)-2-deoxy-beta-D-galactopyra nosyl]oxy]-14,14-bis[[3-[[3-[[5-[[2-(acetylamino)-2-deoxy-b eta-D-galactopyranosyl]oxy]-1-oxopentyl]amino]propyl]amino] -3-oxopropoxy]methyl]-1,12,19,25-tetraoxo-16-oxa-13,20,24-t riazanonacos-1-yl]-4-hydroxy-2-pyrrolidinyl)methyl ester
  misc_feature 1..19: note = RNA
  misc_feature 20: note = DNA
gttaacaccatttacttcaa

SEQ ID NO: 102 - DNA, 20 bp, synthetic construct
  source 1..20: mol_type = other DNA
  modified_base 1: mod_base = OTHER; note = 2'-O-methylguanosine-3'-phosphorothioate
  modified_base 2: mod_base = OTHER; note = 2'-deoxy-2'-fluorouridine-3'-phosphorothioate
  modified_base 3: mod_base = OTHER; note = 2'-O-methyluridine-3'-phosphorothioate
  modified_base 4: mod_base = OTHER; note = 2'-deoxy-2'-fluoroadenosine-3'-phosphorothioate
  modified_base 5: mod_base = OTHER; note = 2'-O-methyladenosine-3'-phosphorothioate
  modified_base 6: mod_base = OTHER; note = 2'-deoxy-2'-fluorocytidine-3'-phosphorothioate
  modified_base 7: mod_base = OTHER; note = 2'-O-methyladenosine-3'-phosphorothioate
  modified_base 8: mod_base = OTHER; note = 2'-deoxy-2'-fluorocytidine-3'-phosphorothioate
  modified_base 9: mod_base = OTHER; note = 2'-O-methylcytidine-3'-phosphorothioate
  modified_base 10: mod_base = OTHER; note = 2'-O-methyladenosine-3'-phosphorothioate
  modified_base 11: mod_base = OTHER; note = 2'-O-methyluridine-3'-phosphorothioate
  modified_base 12: mod_base = OTHER; note = 2'-deoxy-2'-fluorouridine-3'-phosphorothioate
  modified_base 13: mod_base = OTHER; note = 2'-O-methyluridine-3'-phosphorothioate
  modified_base 14: mod_base = OTHER; note = 2'-deoxy-2'-fluoroadenosine-3'-phosphorothioate
  modified_base 15: mod_base = OTHER; note = 2'-O-methylcytidine-3'-phosphorothioate
  modified_base 16: mod_base = OTHER; note = 2'-O,4'-C-methylmethylene 5-methyluridine-3'-phosphorothioate
  modified_base 17: mod_base = OTHER; note = 2'-O-methyluridine-3'-phosphorothioate
  modified_base 18: mod_base = OTHER; note = 2'-O,4'-C-methylmethylene 5-methylcytidine-3'-phosphorothioate
  modified_base 19: mod_base = OTHER; note = 2'-O-methyladenosine-3'-phosphate
  modified_base 20: mod_base = OTHER; note = 2'-deoxyadenosine-3'-phosphate ((2S,4R)-1-[29-[[2-(acetylamino)-2-deoxy-beta-D-galactopyra nosyl]oxy]-14,14-bis[[3-[[3-[[5-[[2-(acetylamino)-2-deoxy-b eta-D-galactopyranosyl]oxy]-1-oxopentyl]amino]propyl]amino] -3-oxopropoxy]methyl]-1,12,19,25-tetraoxo-16-oxa-13,20,24-t riazanonacos-1-yl]-4-hydroxy-2-pyrrolidinyl)methyl ester
  misc_feature 1..19: note = RNA
  misc_feature 20: note = DNA
gttaacaccatttacttcaa

SEQ ID NO: 103 - DNA, 20 bp, synthetic construct
  source 1..20: mol_type = other DNA
  modified_base 1: mod_base = OTHER; note = 2'-O-methylguanosine-3'-phosphorothioate
  modified_base 2: mod_base = OTHER; note = 2'-deoxy-2'-fluorouridine-3'-phosphorothioate
  modified_base 3: mod_base = OTHER; note = 2'-O-methyluridine-3'-phosphorothioate
  modified_base 4: mod_base = OTHER; note = 2'-deoxy-2'-fluoroadenosine-3'-phosphorothioate
  modified_base 5: mod_base = OTHER; note = 2'-O-methyladenosine-3'-phosphorothioate
  modified_base 6: mod_base = OTHER; note = 2'-deoxy-2'-fluorocytidine-3'-phosphorothioate
  modified_base 7: mod_base = OTHER; note = 2'-O-methyladenosine-3'-phosphorothioate
  modified_base 8: mod_base = OTHER; note = 2'-deoxy-2'-fluorocytidine-3'-phosphorothioate
  modified_base 9: mod_base = OTHER; note = 2'-O,4'-C-methylmethylene 5-methylcytidine-3'-phosphorothioate
  modified_base 10: mod_base = OTHER; note = 2'-O-methyladenosine-3'-phosphorothioate
  modified_base 11: mod_base = OTHER; note = 2'-O,4'-C-methylmethylene 5-methyluridine-3'-phosphorothioate
  modified_base 12: mod_base = OTHER; note = 2'-deoxy-2'-fluorouridine-3'-phosphorothioate
  modified_base 13: mod_base = OTHER; note = 2'-O-methyluridine-3'-phosphorothioate
  modified_base 14: mod_base = OTHER; note = 2'-deoxy-2'-fluoroadenosine-3'-phosphorothioate
  modified_base 15: mod_base = OTHER; note = 2'-O-methylcytidine-3'-phosphorothioate
  modified_base 16: mod_base = OTHER; note = 2'-deoxy-2'-fluorouridine-3'-phosphorothioate
  modified_base 17: mod_base = OTHER; note = 2'-O-methyluridine-3'-phosphorothioate
  modified_base 18: mod_base = OTHER; note = 2'-deoxy-2'-fluorocytidine-3'-phosphorothioate
  modified_base 19: mod_base = OTHER; note = 2'-O-methyladenosine-3'-phosphate
  modified_base 20: mod_base = OTHER; note = 2'-deoxyadenosine-3'-phosphate ((2S,4R)-1-[29-[[2-(acetylamino)-2-deoxy-beta-D-galactopyra nosyl]oxy]-14,14-bis[[3-[[3-[[5-[[2-(acetylamino)-2-deoxy-b eta-D-galactopyranosyl]oxy]-1-oxopentyl]amino]propyl]amino] -3-oxopropoxy]methyl]-1,12,19,25-tetraoxo-16-oxa-13,20,24-t riazanonacos-1-yl]-4-hydroxy-2-pyrrolidinyl)methyl ester
  misc_feature 1..19: note = RNA
  misc_feature 20: note = DNA
gttaacaccatttacttcaa

SEQ ID NO: 104 - DNA, 20 bp, synthetic construct
  source 1..20: mol_type = other DNA
  modified_base 1: mod_base = OTHER; note = 2'-O-methylguanosine-3'-phosphorothioate
  modified_base 2: mod_base = OTHER; note = 2'-O,4'-C-methylmethylene 5-methyluridine-3'-phosphorothioate
  modified_base 3: mod_base = OTHER; note = 2'-O-methyluridine-3'-phosphorothioate
  modified_base 4: mod_base = OTHER; note = 2'-deoxy-2'-fluoroadenosine-3'-phosphorothioate
  modified_base 5: mod_base = OTHER; note = 2'-O-methyladenosine-3'-phosphorothioate
  modified_base 6: mod_base = OTHER; note = 2'-O,4'-C-methylmethylene 5-methylcytidine-3'-phosphorothioate
  modified_base 7: mod_base = OTHER; note = 2'-O-methyladenosine-3'-phosphorothioate
  modified_base 8: mod_base = OTHER; note = 2'-deoxy-2'-fluorocytidine-3'-phosphorothioate
  modified_base 9: mod_base = OTHER; note = 2'-O-methylcytidine-3'-phosphorothioate
  modified_base 10: mod_base = OTHER; note = 2'-O-methyladenosine-3'-phosphorothioate
  modified_base 11: mod_base = OTHER; note = 2'-O-methyluridine-3'-phosphorothioate
  modified_base 12: mod_base = OTHER; note = 2'-O,4'-C-methylmethylene 5-methyluridine-3'-phosphorothioate
  modified_base 13: mod_base = OTHER; note = 2'-O-methyluridine-3'-phosphorothioate
  modified_base 14: mod_base = OTHER; note = 2'-deoxy-2'-fluoroadenosine-3'-phosphorothioate
  modified_base 15: mod_base = OTHER; note = 2'-O-methylcytidine-3'-phosphorothioate
  modified_base 16: mod_base = OTHER; note = 2'-deoxy-2'-fluorouridine-3'-phosphorothioate
  modified_base 17: mod_base = OTHER; note = 2'-O-methyluridine-3'-phosphorothioate
  modified_base 18: mod_base = OTHER; note = 2'-deoxy-2'-fluorocytidine-3'-phosphorothioate
  modified_base 19: mod_base = OTHER; note = 2'-O-methyladenosine-3'-phosphate
  modified_base 20: mod_base = OTHER; note = 2'-deoxyadenosine-3'-phosphate ((2S,4R)-1-[29-[[2-(acetylamino)-2-deoxy-beta-D-galactopyra nosyl]oxy]-14,14-bis[[3-[[3-[[5-[[2-(acetylamino)-2-deoxy-b eta-D-galactopyranosyl]oxy]-1-oxopentyl]amino]propyl]amino] -3-oxopropoxy]methyl]-1,12,19,25-tetraoxo-16-oxa-13,20,24-t riazanonacos-1-yl]-4-hydroxy-2-pyrrolidinyl)methyl ester
  misc_feature 1..19: note = RNA
  misc_feature 20: note = DNA
gttaacaccatttacttcaa

SEQ ID NO: 105 - DNA, 20 bp, synthetic construct
  source 1..20: mol_type = other DNA
  modified_base 1: mod_base = OTHER; note = 2'-O-methylguanosine-3'-phosphorothioate
  modified_base 2: mod_base = OTHER; note = 2'-O-methylguanosine-3'-phosphorothioate
  modified_base 3: mod_base = OTHER; note = 2'-O,4'-C-methylmethylene 5-methyluridine-3'-phosphorothioate
  modified_base 4: mod_base = OTHER; note = 2'-O-methyluridine-3'-phosphorothioate
  modified_base 5: mod_base = OTHER; note = 2'-O-methyladenosine-3'-phosphorothioate
  modified_base 6: mod_base = OTHER; note = 2'-O-methyladenosine-3'-phosphorothioate
  modified_base 7: mod_base = OTHER; note = 2'-O-methylcytidine-3'-phosphorothioate
  modified_base 8: mod_base = OTHER; note = 2'-O-methyladenosine-3'-phosphorothioate
  modified_base 9: mod_base = OTHER; note = 2'-O,4'-C-methylmethylene 5-methylcytidine-3'-phosphorothioate
  modified_base 10: mod_base = OTHER; note = 2'-O-methylcytidine-3'-phosphorothioate
  modified_base 11: mod_base = OTHER; note = 2'-O-methyladenosine-3'-phosphorothioate
  modified_base 12: mod_base = OTHER; note = 2'-O-methyluridine-3'-phosphorothioate
  modified_base 13: mod_base = OTHER; note = 2'-O-methyluridine-3'-phosphorothioate
  modified_base 14: mod_base = OTHER; note = 2'-O-methyluridine-3'-phosphorothioate
  modified_base 15: mod_base = OTHER; note = 2'-O-methyladenosine-3'-phosphorothioate
  modified_base 16: mod_base = OTHER; note = 2'-O,4'-C-methylmethylene 5-methylcytidine-3'-phosphorothioate
  modified_base 17: mod_base = OTHER; note = 2'-O-methyluridine-3'-phosphorothioate
  modified_base 18: mod_base = OTHER; note = 2'-O,4'-C-methylmethylene 5-methyluridine-3'-phosphorothioate
  modified_base 19: mod_base = OTHER; note = 2'-O,4'-C-methylmethylene 5-methylcytidine-3'-phosphate
  modified_base 20: mod_base = OTHER; note = 2'-deoxyadenosine-3'-phosphate ((2S,4R)-1-[29-[[2-(acetylamino)-2-deoxy-beta-D-galactopyra nosyl]oxy]-14,14-bis[[3-[[3-[[5-[[2-(acetylamino)-2-deoxy-b eta-D-galactopyranosyl]oxy]-1-oxopentyl]amino]propyl]amino] -3-oxopropoxy]methyl]-1,12,19,25-tetraoxo-16-oxa-13,20,24-t riazanonacos-1-yl]-4-hydroxy-2-pyrrolidinyl)methyl ester
  misc_feature 1..19: note = RNA
  misc_feature 20: note = DNA
ggttaacaccatttacttca

SEQ ID NO: 106 - DNA, 20 bp, synthetic construct
  source 1..20: mol_type = other DNA
  modified_base 1: mod_base = OTHER; note = 2'-O,4'-C-methylmethylene 5-methyluridine-3'-phosphorothioate
  modified_base 2: mod_base = OTHER; note = 2'-O-methylguanosine-3'-phosphorothioate
  modified_base 3: mod_base = OTHER; note = 2'-O-methylguanosine-3'-phosphorothioate
  modified_base 4: mod_base = OTHER; note = 2'-O,4'-C-methylmethylene 5-methyluridine-3'-phosphorothioate
  modified_base 5: mod_base = OTHER; note = 2'-O-methyluridine-3'-phosphorothioate
  modified_base 6: mod_base = OTHER; note = 2'-O-methyladenosine-3'-phosphorothioate
  modified_base 7: mod_base = OTHER; note = 2'-O-methyladenosine-3'-phosphorothioate
  modified_base 8: mod_base = OTHER; note = 2'-O-methylcytidine-3'-phosphorothioate
  modified_base 9: mod_base = OTHER; note = 2'-O-methyladenosine-3'-phosphorothioate
  modified_base 10: mod_base = OTHER; note = 2'-O,4'-C-methylmethylene 5-methylcytidine-3'-phosphorothioate
  modified_base 11: mod_base = OTHER; note = 2'-O-methylcytidine-3'-phosphorothioate
  modified_base 12: mod_base = OTHER; note = 2'-O-methyladenosine-3'-phosphorothioate
  modified_base 13: mod_base = OTHER; note = 2'-O-methyluridine-3'-phosphorothioate
  modified_base 14: mod_base = OTHER; note = 2'-O-methyluridine-3'-phosphorothioate
  modified_base 15: mod_base = OTHER; note = 2'-O-methyluridine-3'-phosphorothioate
  modified_base 16: mod_base = OTHER; note = 2'-O-methyladenosine-3'-phosphorothioate
  modified_base 17: mod_base = OTHER; note = 2'-O,4'-C-methylmethylene 5-methylcytidine-3'-phosphorothioate
  modified_base 18: mod_base = OTHER; note = 2'-O-methyluridine-3'-phosphorothioate
  modified_base 19: mod_base = OTHER; note = 2'-O,4'-C-methylmethylene 5-methyluridine-3'-phosphate
  modified_base 20: mod_base = OTHER; note = 2'-deoxycytidine-3'-phosphate ((2S,4R)-1-[29-[[2-(acetylamino)-2-deoxy-beta-D-galactopyra nosyl]oxy]-14,14-bis[[3-[[3-[[5-[[2-(acetylamino)-2-deoxy-b eta-D-galactopyranosyl]oxy]-1-oxopentyl]amino]propyl]amino] -3-oxopropoxy]methyl]-1,12,19,25-tetraoxo-16-oxa-13,20,24-t riazanonacos-1-yl]-4-hydroxy-2-pyrrolidinyl)methyl ester
  misc_feature 1..19: note = RNA
  misc_feature 20: note = DNA
tggttaacaccatttacttc

SEQ ID NO: 107 - DNA, 20 bp, synthetic construct
  source 1..20: mol_type = other DNA
  modified_base 1: mod_base = OTHER; note = 2'-O-methylcytidine-3'-phosphorothioate
  modified_base 2: mod_base = OTHER; note = 2'-O,4'-C-methylmethylene 5-methyluridine-3'-phosphorothioate
  modified_base 3: mod_base = OTHER; note = 2'-O-methylguanosine-3'-phosphorothioate
  modified_base 4: mod_base = OTHER; note = 2'-O-methylguanosine-3'-phosphorothioate
  modified_base 5: mod_base = OTHER; note = 2'-O,4'-C-methylmethylene 5-methyluridine-3'-phosphorothioate
  modified_base 6: mod_base = OTHER; note = 2'-O-methyluridine-3'-phosphorothioate
  modified_base 7: mod_base = OTHER; note = 2'-O-methyladenosine-3'-phosphorothioate
  modified_base 8: mod_base = OTHER; note = 2'-O-methyladenosine-3'-phosphorothioate
  modified_base 9: mod_base = OTHER; note = 2'-O-methylcytidine-3'-phosphorothioate
  modified_base 10: mod_base = OTHER; note = 2'-O-methyladenosine-3'-phosphorothioate
  modified_base 11: mod_base = OTHER; note = 2'-O,4'-C-methylmethylene 5-methylcytidine-3'-phosphorothioate
  modified_base 12: mod_base = OTHER; note = 2'-O-methylcytidine-3'-phosphorothioate
  modified_base 13: mod_base = OTHER; note = 2'-O-methyladenosine-3'-phosphorothioate
  modified_base 14: mod_base = OTHER; note = 2'-O-methyluridine-3'-phosphorothioate
  modified_base 15: mod_base = OTHER; note = 2'-O-methyluridine-3'-phosphorothioate
  modified_base 16: mod_base = OTHER; note = 2'-O,4'-C-methylmethylene 5-methyluridine-3'-phosphorothioate
  modified_base 17: mod_base = OTHER; note = 2'-O-methyladenosine-3'-phosphorothioate
  modified_base 18: mod_base = OTHER; note = 2'-O,4'-C-methylmethylene 5-methylcytidine-3'-phosphorothioate
  modified_base 19: mod_base = OTHER; note = 2'-O-methyluridine-3'-phosphate
  modified_base 20: mod_base = OTHER; note = 2'-deoxythymidine-3'-phosphate ((2S,4R)-1-[29-[[2-(acetylamino)-2-deoxy-beta-D-galactopyra nosyl]oxy]-14,14-bis[[3-[[3-[[5-[[2-(acetylamino)-2-deoxy-b eta-D-galactopyranosyl]oxy]-1-oxopentyl]amino]propyl]amino] -3-oxopropoxy]methyl]-1,12,19,25-tetraoxo-16-oxa-13,20,24-t riazanonacos-1-yl]-4-hydroxy-2-pyrrolidinyl)methyl ester
  misc_feature 1..19: note = RNA
  misc_feature 20: note = DNA
ctggttaacaccatttactt

SEQ ID NO: 108 - DNA, 20 bp, synthetic construct
  source 1..20: mol_type = other DNA
  modified_base 1: mod_base = OTHER; note = 2'-O-methylguanosine-3'-phosphorothioate
  modified_base 2: mod_base = OTHER; note = 2'-O,4'-C-methylmethylene 5-methyluridine-3'-phosphorothioate
  modified_base 3: mod_base = OTHER; note = 2'-deoxy-2'-fluorouridine-3'-phosphorothioate
  modified_base 4: mod_base = OTHER; note = 2'-deoxy-2'-fluoroadenosine-3'-phosphorothioate
  modified_base 5: mod_base = OTHER; note = 2'-deoxy-2'-fluoroadenosine-3'-phosphorothioate
  modified_base 6: mod_base = OTHER; note = 2'-deoxy-2'-fluorocytidine-3'-phosphorothioate
  modified_base 7: mod_base = OTHER; note = 2'-deoxy-2'-fluoroadenosine-3'-phosphorothioate
  modified_base 8: mod_base = OTHER; note = 2'-O,4'-C-methylmethylene 5-methylcytidine-3'-phosphorothioate
  modified_base 9: mod_base = OTHER; note = 2'-deoxy-2'-fluorocytidine-3'-phosphorothioate
  modified_base 10: mod_base = OTHER; note = 2'-deoxy-2'-fluoroadenosine-3'-phosphorothioate
  modified_base 11: mod_base = OTHER; note = 2'-deoxy-2'-fluorouridine-3'-phosphorothioate
  modified_base 12: mod_base = OTHER; note = 2'-deoxy-2'-fluorouridine-3'-phosphorothioate
  modified_base 13: mod_base = OTHER; note = 2'-deoxy-2'-fluorouridine-3'-phosphorothioate
  modified_base 14: mod_base = OTHER; note = 2'-deoxy-2'-fluoroadenosine-3'-phosphorothioate
  modified_base 15: mod_base = OTHER; note = 2'-O,4'-C-methylmethylene 5-methylcytidine-3'-phosphorothioate
  modified_base 16: mod_base = OTHER; note = 2'-deoxy-2'-fluorouridine-3'-phosphorothioate
  modified_base 17: mod_base = OTHER; note = 2'-O,4'-C-methylmethylene 5-methyluridine-3'-phosphorothioate
  modified_base 18: mod_base = OTHER; note = 2'-O,4'-C-methylmethylene 5-methylcytidine-3'-phosphorothioate
  modified_base 19: mod_base = OTHER; note = 2'-O-methyladenosine-3'-phosphate
  modified_base 20: mod_base = OTHER; note = 2'-deoxyadenosine-3'-phosphate ((2S,4R)-1-[29-[[2-(acetylamino)-2-deoxy-beta-D-galactopyra nosyl]oxy]-14,14-bis[[3-[[3-[[5-[[2-(acetylamino)-2-deoxy-b eta-D-galactopyranosyl]oxy]-1-oxopentyl]amino]propyl]amino] -3-oxopropoxy]methyl]-1,12,19,25-tetraoxo-16-oxa-13,20,24-t riazanonacos-1-yl]-4-hydroxy-2-pyrrolidinyl)methyl ester
  misc_feature 1..19: note = RNA
  misc_feature 20: note = DNA
gttaacaccatttacttcaa

SEQ ID NO: 109 - DNA, 20 bp, synthetic construct
  source 1..20: mol_type = other DNA
  modified_base 1: mod_base = OTHER; note = 2'-O-methylguanosine-3'-phosphorothioate
  modified_base 2: mod_base = OTHER; note = 2'-deoxy-2'-fluorouridine-3'-phosphorothioate
  modified_base 3: mod_base = OTHER; note = 2'-deoxy-2'-fluorouridine-3'-phosphorothioate
  modified_base 4: mod_base = OTHER; note = 2'-deoxy-2'-fluoroadenosine-3'-phosphorothioate
  modified_base 5: mod_base = OTHER; note = 2'-deoxy-2'-fluoroadenosine-3'-phosphorothioate
  modified_base 6: mod_base = OTHER; note = 2'-deoxy-2'-fluorocytidine-3'-phosphorothioate
  modified_base 7: mod_base = OTHER; note = 2'-deoxy-2'-fluoroadenosine-3'-phosphorothioate
  modified_base 8: mod_base = OTHER; note = 2'-deoxy-2'-fluorocytidine-3'-phosphorothioate
  modified_base 9: mod_base = OTHER; note = 2'-deoxy-2'-fluorocytidine-3'-phosphorothioate
  modified_base 10: mod_base = OTHER; note = 2'-deoxy-2'-fluoroadenosine-3'-phosphorothioate
  modified_base 11: mod_base = OTHER; note = 2'-deoxy-2'-fluorouridine-3'-phosphorothioate
  modified_base 12: mod_base = OTHER; note = 2'-deoxy-2'-fluorouridine-3'-phosphorothioate
  modified_base 13: mod_base = OTHER; note = 2'-deoxy-2'-fluorouridine-3'-phosphorothioate
  modified_base 14: mod_base = OTHER; note = 2'-deoxy-2'-fluoroadenosine-3'-phosphorothioate
  modified_base 15: mod_base = OTHER; note = 2'-deoxy-2'-fluorocytidine-3'-phosphorothioate
  modified_base 16: mod_base = OTHER; note = 2'-deoxy-2'-fluorouridine-3'-phosphorothioate
  modified_base 17: mod_base = OTHER; note = 2'-deoxy-2'-fluorouridine-3'-phosphorothioate
  modified_base 18: mod_base = OTHER; note = 2'-deoxy-2'-fluorocytidine-3'-phosphorothioate
  modified_base 19: mod_base = OTHER; note = 2'-O-methyladenosine-3'-phosphate
  modified_base 20: mod_base = OTHER; note = 2'-deoxyadenosine-3'-phosphate ((2S,4R)-1-[29-[[2-(acetylamino)-2-deoxy-beta-D-galactopyra nosyl]oxy]-14,14-bis[[3-[[3-[[5-[[2-(acetylamino)-2-deoxy-b eta-D-galactopyranosyl]oxy]-1-oxopentyl]amino]propyl]amino] -3-oxopropoxy]methyl]-1,12,19,25-tetraoxo-16-oxa-13,20,24-t riazanonacos-1-yl]-4-hydroxy-2-pyrrolidinyl)methyl ester
  misc_feature 1..19: note = RNA
  misc_feature 20: note = DNA
gttaacaccatttacttcaa

SEQ ID NO: 110 - DNA, 20 bp, synthetic construct
  source 1..20: mol_type = other DNA
  modified_base 1: mod_base = OTHER; note = 2'-O-methylguanosine-3'-phosphorothioate
  modified_base 2: mod_base = OTHER; note = 2'-deoxy-2'-fluorouridine-3'-phosphorothioate
  modified_base 3: mod_base = OTHER; note = 2'-deoxy-2'-fluorouridine-3'-phosphate
  modified_base 4: mod_base = OTHER; note = 2'-deoxy-2'-fluoroadenosine-3'-phosphate
  modified_base 5: mod_base = OTHER; note = 2'-deoxy-2'-fluoroadenosine-3'-phosphate
  modified_base 6: mod_base = OTHER; note = 2'-deoxy-2'-fluorocytidine-3'-phosphate
  modified_base 7: mod_base = OTHER; note = 2'-deoxy-2'-fluoroadenosine-3'-phosphate
  modified_base 8: mod_base = OTHER; note = 2'-deoxy-2'-fluorocytidine-3'-phosphate
  modified_base 9: mod_base = OTHER; note = 2'-deoxy-2'-fluorocytidine-3'-phosphate
  modified_base 10: mod_base = OTHER; note = 2'-deoxy-2'-fluoroadenosine-3'-phosphate
  modified_base 11: mod_base = OTHER; note = 2'-deoxy-2'-fluorouridine-3'-phosphate
  modified_base 12: mod_base = OTHER; note = 2'-deoxy-2'-fluorouridine-3'-phosphate
  modified_base 13: mod_base = OTHER; note = 2'-deoxy-2'-fluorouridine-3'-phosphate
  modified_base 14: mod_base = OTHER; note = 2'-deoxy-2'-fluoroadenosine-3'-phosphate
  modified_base 15: mod_base = OTHER; note = 2'-deoxy-2'-fluorocytidine-3'-phosphate
  modified_base 16: mod_base = OTHER; note = 2'-deoxy-2'-fluorouridine-3'-phosphate
  modified_base 17: mod_base = OTHER; note = 2'-deoxy-2'-fluorouridine-3'-phosphorothioate
  modified_base 18: mod_base = OTHER; note = 2'-deoxy-2'-fluorocytidine-3'-phosphorothioate
  modified_base 19: mod_base = OTHER; note = 2'-O-methyladenosine-3'-phosphate
  modified_base 20: mod_base = OTHER; note = 2'-deoxyadenosine-3'-phosphate ((2S,4R)-1-[29-[[2-(acetylamino)-2-deoxy-beta-D-galactopyra nosyl]oxy]-14,14-bis[[3-[[3-[[5-[[2-(acetylamino)-2-deoxy-b eta-D-galactopyranosyl]oxy]-1-oxopentyl]amino]propyl]amino] -3-oxopropoxy]methyl]-1,12,19,25-tetraoxo-16-oxa-13,20,24-t riazanonacos-1-yl]-4-hydroxy-2-pyrrolidinyl)methyl ester
  misc_feature 1..19: note = RNA
  misc_feature 20: note = DNA
gttaacaccatttacttcaa

SEQ ID NO: 111 - DNA, 23 bp, synthetic construct
  source 1..23: mol_type = other DNA
  modified_base 1: mod_base = OTHER; note = 2'-O-methylcytidine-3'-phosphorothioate
  modified_base 2: mod_base = OTHER; note = 2'-O-methyluridine-3'-phosphorothioate
  modified_base 3: mod_base = OTHER; note = 2'-O-methylguanosine-3'-phosphorothioate
  modified_base 4: mod_base = OTHER; note = 2'-O-methylguanosine-3'-phosphorothioate
  modified_base 5: mod_base = OTHER; note = 2'-O-methyluridine-3'-phosphorothioate
  modified_base 6: mod_base = OTHER; note = 2'-O-methyluridine-3'-phosphorothioate
  modified_base 7: mod_base = OTHER; note = 2'-O-methyladenosine-3'-phosphorothioate
  modified_base 8: mod_base = OTHER; note = 2'-O-methyladenosine-3'-phosphorothioate
  modified_base 9: mod_base = OTHER; note = 2'-O-methylcytidine-3'-phosphorothioate
  modified_base 10: mod_base = OTHER; note = 2'-O-methyladenosine-3'-phosphorothioate
  modified_base 11: mod_base = OTHER; note = 2'-O-methylcytidine-3'-phosphorothioate
  modified_base 12: mod_base = OTHER; note = 2'-O-methylcytidine-3'-phosphorothioate
  modified_base 13: mod_base = OTHER; note = 2'-O-methyladenosine-3'-phosphorothioate
  modified_base 14: mod_base = OTHER; note = 2'-O,4'-C-methylene 5-methyluridine-3'-phosphorothioate
  modified_base 15: mod_base = OTHER; note = 2'-O-methyluridine-3'-phosphorothioate
  modified_base 16: mod_base = OTHER; note = 2'-O,4'-C-methylene 5-methyluridine-3'-phosphorothioate
  modified_base 17: mod_base = OTHER; note = 2'-O-methyladenosine-3'-phosphorothioate
  modified_base 18: mod_base = OTHER; note = 2'-O,4'-C-methylene 5-methylcytidine-3'-phosphorothioate
  modified_base 19: mod_base = OTHER; note = 2'-O-methyluridine-3'-phosphorothioate
  modified_base 20: mod_base = OTHER; note = 2'-O,4'-C-methylene 5-methyluridine-3'-phosphorothioate
  modified_base 21: mod_base = OTHER; note = 2'-O,4'-C-methylene 5-methylcytidine-3'-phosphorothioate
  modified_base 22: mod_base = OTHER; note = 2'-O-methyladenosine-3'-phosphate
  modified_base 23: mod_base = OTHER; note = 2'-deoxyadenosine-3'-phosphate ((2S,4R)-1-[29-[[2-(acetylamino)-2-deoxy-beta-D-galactopyra nosyl]oxy]-14,14-bis[[3-[[3-[[5-[[2-(acetylamino)-2-deoxy-b eta-D-galactopyranosyl]oxy]-1-oxopentyl]amino]propyl]amino] -3-oxopropoxy]methyl]-1,12,19,25-tetraoxo-16-oxa-13,20,24-t riazanonacos-1-yl]-4-hydroxy-2-pyrrolidinyl)methyl ester
  misc_feature 1..22: note = RNA
  misc_feature 23: note = DNA
ctggttaacaccatttacttcaa

SEQ ID NO: 112 - DNA, 20 bp, synthetic construct
  source 1..20: mol_type = other DNA
  modified_base 1: mod_base = OTHER; note = 2'-O-methylguanosine-3'-phosphorothioate
  modified_base 2: mod_base = OTHER; note = 2'-O-methyluridine-3'-phosphorothioate
  modified_base 3: mod_base = OTHER; note = 2'-O-methyluridine-3'-phosphorothioate
  modified_base 4: mod_base = OTHER; note = 2'-O-methyladenosine-3'-phosphorothioate
  modified_base 5: mod_base = OTHER; note = 2'-O-methyladenosine-3'-phosphorothioate
  modified_base 6: mod_base = OTHER; note = 2'-O-methylcytidine-3'-phosphorothioate
  modified_base 7: mod_base = OTHER; note = 2'-O-methyladenosine-3'-phosphorothioate
  modified_base 8: mod_base = OTHER; note = 2'-O-methylcytidine-3'-phosphorothioate
  modified_base 9: mod_base = OTHER; note = 2'-O-methylcytidine-3'-phosphorothioate
  modified_base 10: mod_base = OTHER; note = 2'-O-methyladenosine-3'-phosphorothioate
  modified_base 11: mod_base = OTHER; note = 2'-O,4'-C-methylene 5-methyluridine-3'-phosphorothioate
  modified_base 12: mod_base = OTHER; note = 2'-O-methyluridine-3'-phosphorothioate
  modified_base 13: mod_base = OTHER; note = 2'-O,4'-C-methylene 5-methyluridine-3'-phosphorothioate
  modified_base 14: mod_base = OTHER; note = 2'-O-methyladenosine-3'-phosphorothioate
  modified_base 15: mod_base = OTHER; note = 2'-O,4'-C-methylene 5-methylcytidine-3'-phosphorothioate
  modified_base 16: mod_base = OTHER; note = 2'-O-methyluridine-3'-phosphorothioate
  modified_base 17: mod_base = OTHER; note = 2'-O,4'-C-methylene 5-methyluridine-3'-phosphorothioate
  modified_base 18: mod_base = OTHER; note = 2'-O,4'-C-methylene 5-methylcytidine-3'-phosphorothioate
  modified_base 19: mod_base = OTHER; note = 2'-O-methyladenosine-3'-phosphate
  modified_base 20: mod_base = OTHER; note = 2'-deoxyadenosine-3'-phosphate ((2S,4R)-1-[29-[[2-(acetylamino)-2-deoxy-beta-D-galactopyra nosyl]oxy]-14,14-bis[[3-[[3-[[5-[[2-(acetylamino)-2-deoxy-b eta-D-galactopyranosyl]oxy]-1-oxopentyl]amino]propyl]amino] -3-oxopropoxy]methyl]-1,12,19,25-tetraoxo-16-oxa-13,20,24-t riazanonacos-1-yl]-4-hydroxy-2-pyrrolidinyl)methyl ester
  misc_feature 1..19: note = RNA
  misc_feature 20: note = DNA
gttaacaccatttacttcaa

SEQ ID NO: 113 - DNA, 16 bp, synthetic construct
  source 1..16: mol_type = other DNA
  modified_base 1: mod_base = OTHER; note = 2'-O-methyladenosine-3'-phosphorothioate
  modified_base 2: mod_base = OTHER; note = 2'-O-methylcytidine-3'-phosphorothioate
  modified_base 3: mod_base = OTHER; note = 2'-O-methyladenosine-3'-phosphorothioate
  modified_base 4: mod_base = OTHER; note = 2'-O-methylcytidine-3'-phosphorothioate
  modified_base 5: mod_base = OTHER; note = 2'-O-methylcytidine-3'-phosphorothioate
  modified_base 6: mod_base = OTHER; note = 2'-O-methyladenosine-3'-phosphorothioate
  modified_base 7: mod_base = OTHER; note = 2'-O,4'-C-methylene 5-methyluridine-3'-phosphorothioate
  modified_base 8: mod_base = OTHER; note = 2'-O-methyluridine-3'-phosphorothioate
  modified_base 9: mod_base = OTHER; note = 2'-O,4'-C-methylene 5-methyluridine-3'-phosphorothioate
  modified_base 10: mod_base = OTHER; note = 2'-O-methyladenosine-3'-phosphorothioate
  modified_base 11: mod_base = OTHER; note = 2'-O,4'-C-methylene 5-methylcytidine-3'-phosphorothioate
  modified_base 12: mod_base = OTHER; note = 2'-O-methyluridine-3'-phosphorothioate
  modified_base 13: mod_base = OTHER; note = 2'-O,4'-C-methylene 5-methyluridine-3'-phosphorothioate
  modified_base 14: mod_base = OTHER; note = 2'-O,4'-C-methylene 5-methylcytidine-3'-phosphorothioate
  modified_base 15: mod_base = OTHER; note = 2'-O-methyladenosine-3'-phosphate
  modified_base 16: mod_base = OTHER; note = 2'-deoxyadenosine-3'-phosphate ((2S,4R)-1-[29-[[2-(acetylamino)-2-deoxy-beta-D-galactopyra nosyl]oxy]-14,14-bis[[3-[[3-[[5-[[2-(acetylamino)-2-deoxy-b eta-D-galactopyranosyl]oxy]-1-oxopentyl]amino]propyl]amino] -3-oxopropoxy]methyl]-1,12,19,25-tetraoxo-16-oxa-13,20,24-t riazanonacos-1-yl]-4-hydroxy-2-pyrrolidinyl)methyl ester
  misc_feature 1..15: note = RNA
  misc_feature 16: note = DNA
acaccatttacttcaa

SEQ ID NO: 114 - DNA, 15 bp, synthetic construct
  source 1..15: mol_type = other DNA
  modified_base 1: mod_base = OTHER; note = 2'-O-methylcytidine-3'-phosphorothioate
  modified_base 2: mod_base = OTHER; note = 2'-O-methyladenosine-3'-phosphorothioate
  modified_base 3: mod_base = OTHER; note = 2'-O-methylcytidine-3'-phosphorothioate
  modified_base 4: mod_base = OTHER; note = 2'-O-methylcytidine-3'-phosphorothioate
  modified_base 5: mod_base = OTHER; note = 2'-O-methyladenosine-3'-phosphorothioate
  modified_base 6: mod_base = OTHER; note = 2'-O,4'-C-methylene 5-methyluridine-3'-phosphorothioate
  modified_base 7: mod_base = OTHER; note = 2'-O-methyluridine-3'-phosphorothioate
  modified_base 8: mod_base = OTHER; note = 2'-O,4'-C-methylene 5-methyluridine-3'-phosphorothioate
  modified_base 9: mod_base = OTHER; note = 2'-O-methyladenosine-3'-phosphorothioate
  modified_base 10: mod_base = OTHER; note = 2'-O,4'-C-methylene 5-methylcytidine-3'-phosphorothioate
  modified_base 11: mod_base = OTHER; note = 2'-O-methyluridine-3'-phosphorothioate
  modified_base 12: mod_base = OTHER; note = 2'-O,4'-C-methylene 5-methyluridine-3'-phosphorothioate
  modified_base 13: mod_base = OTHER; note = 2'-O,4'-C-methylene 5-methylcytidine-3'-phosphorothioate
  modified_base 14: mod_base = OTHER; note = 2'-O-methyladenosine-3'-phosphate
  modified_base 15: mod_base = OTHER; note = 2'-deoxyadenosine-3'-phosphate ((2S,4R)-1-[29-[[2-(acetylamino)-2-deoxy-beta-D-galactopyra nosyl]oxy]-14,14-bis[[3-[[3-[[5-[[2-(acetylamino)-2-deoxy-b eta-D-galactopyranosyl]oxy]-1-oxopentyl]amino]propyl]amino] -3-oxopropoxy]methyl]-1,12,19,25-tetraoxo-16-oxa-13,20,24-t riazanonacos-1-yl]-4-hydroxy-2-pyrrolidinyl)methyl ester
  misc_feature 1..14: note = RNA
  misc_feature 15: note = DNA
caccatttacttcaa

SEQ ID NO: 115 - DNA, 14 bp, synthetic construct
  source 1..14: mol_type = other DNA
  modified_base 1: mod_base = OTHER; note = 2'-O-methyladenosine-3'-phosphorothioate
  modified_base 2: mod_base = OTHER; note = 2'-O-methylcytidine-3'-phosphorothioate
  modified_base 3: mod_base = OTHER; note = 2'-O-methylcytidine-3'-phosphorothioate
  modified_base 4: mod_base = OTHER; note = 2'-O-methyladenosine-3'-phosphorothioate
  modified_base 5: mod_base = OTHER; note = 2'-O,4'-C-methylene 5-methyluridine-3'-phosphorothioate
  modified_base 6: mod_base = OTHER; note = 2'-O-methyluridine-3'-phosphorothioate
  modified_base 7: mod_base = OTHER; note = 2'-O,4'-C-methylene 5-methyluridine-3'-phosphorothioate
  modified_base 8: mod_base = OTHER; note = 2'-O-methyladenosine-3'-phosphorothioate
  modified_base 9: mod_base = OTHER; note = 2'-O,4'-C-methylene 5-methylcytidine-3'-phosphorothioate
  modified_base 10: mod_base = OTHER; note = 2'-O-methyluridine-3'-phosphorothioate
  modified_base 11: mod_base = OTHER; note = 2'-O,4'-C-methylene 5-methyluridine-3'-phosphorothioate
  modified_base 12: mod_base = OTHER; note = 2'-O,4'-C-methylene 5-methylcytidine-3'-phosphorothioate
  modified_base 13: mod_base = OTHER; note = 2'-O-methyladenosine-3'-phosphate
  modified_base 14: mod_base = OTHER; note = 2'-deoxyadenosine-3'-phosphate ((2S,4R)-1-[29-[[2-(acetylamino)-2-deoxy-beta-D-galactopyra nosyl]oxy]-14,14-bis[[3-[[3-[[5-[[2-(acetylamino)-2-deoxy-b eta-D-galactopyranosyl]oxy]-1-oxopentyl]amino]propyl]amino] -3-oxopropoxy]methyl]-1,12,19,25-tetraoxo-16-oxa-13,20,24-t riazanonacos-1-yl]-4-hydroxy-2-pyrrolidinyl)methyl ester
  misc_feature 1..13: note = RNA
  misc_feature 14: note = DNA
accatttacttcaa

SEQ ID NO: 116 - DNA, 13 bp, synthetic construct
  source 1..13: mol_type = other DNA
  modified_base 1: mod_base = OTHER; note = 2'-O-methylcytidine-3'-phosphorothioate
  modified_base 2: mod_base = OTHER; note = 2'-O-methylcytidine-3'-phosphorothioate
  modified_base 3: mod_base = OTHER; note = 2'-O-methyladenosine-3'-phosphorothioate
  modified_base 4: mod_base = OTHER; note = 2'-O,4'-C-methylene 5-methyluridine-3'-phosphorothioate
  modified_base 5: mod_base = OTHER; note = 2'-O-methyluridine-3'-phosphorothioate
  modified_base 6: mod_base = OTHER; note = 2'-O,4'-C-methylene 5-methyluridine-3'-phosphorothioate
  modified_base 7: mod_base = OTHER; note = 2'-O-methyladenosine-3'-phosphorothioate
  modified_base 8: mod_base = OTHER; note = 2'-O,4'-C-methylene 5-methylcytidine-3'-phosphorothioate
  modified_base 9: mod_base = OTHER; note = 2'-O-methyluridine-3'-phosphorothioate
  modified_base 10: mod_base = OTHER; note = 2'-O,4'-C-methylene 5-methyluridine-3'-phosphorothioate
  modified_base 11: mod_base = OTHER; note = 2'-O,4'-C-methylene 5-methylcytidine-3'-phosphorothioate
  modified_base 12: mod_base = OTHER; note = 2'-O-methyladenosine-3'-phosphate
  modified_base 13: mod_base = OTHER; note = 2'-deoxyadenosine-3'-phosphate ((2S,4R)-1-[29-[[2-(acetylamino)-2-deoxy-beta-D-galactopyra nosyl]oxy]-14,14-bis[[3-[[3-[[5-[[2-(acetylamino)-2-deoxy-b eta-D-galactopyranosyl]oxy]-1-oxopentyl]amino]propyl]amino] -3-oxopropoxy]methyl]-1,12,19,25-tetraoxo-16-oxa-13,20,24-t riazanonacos-1-yl]-4-hydroxy-2-pyrrolidinyl)methyl ester
  misc_feature 1..12: note = RNA
  misc_feature 13: note = DNA
ccatttacttcaa

SEQ ID NO: 117 - DNA, 12 bp, synthetic construct
  source 1..12: mol_type = other DNA
  modified_base 1: mod_base = OTHER; note = 2'-O-methylcytidine-3'-phosphorothioate
  modified_base 2: mod_base = OTHER; note = 2'-O-methyladenosine-3'-phosphorothioate
  modified_base 3: mod_base = OTHER; note = 2'-O,4'-C-methylene 5-methyluridine-3'-phosphorothioate
  modified_base 4: mod_base = OTHER; note = 2'-O-methyluridine-3'-phosphorothioate
  modified_base 5: mod_base = OTHER; note = 2'-O,4'-C-methylene 5-methyluridine-3'-phosphorothioate
  modified_base 6: mod_base = OTHER; note = 2'-O-methyladenosine-3'-phosphorothioate
  modified_base 7: mod_base = OTHER; note = 2'-O,4'-C-methylene 5-methylcytidine-3'-phosphorothioate
  modified_base 8: mod_base = OTHER; note = 2'-O-methyluridine-3'-phosphorothioate
  modified_base 9: mod_base = OTHER; note = 2'-O,4'-C-methylene 5-methyluridine-3'-phosphorothioate
  modified_base 10: mod_base = OTHER; note = 2'-O,4'-C-methylene 5-methylcytidine-3'-phosphorothioate
  modified_base 11: mod_base = OTHER; note = 2'-O-methyladenosine-3'-phosphate
  modified_base 12: mod_base = OTHER; note = 2'-deoxyadenosine-3'-phosphate ((2S,4R)-1-[29-[[2-(acetylamino)-2-deoxy-beta-D-galactopyra nosyl]oxy]-14,14-bis[[3-[[3-[[5-[[2-(acetylamino)-2-deoxy-b eta-D-galactopyranosyl]oxy]-1-oxopentyl]amino]propyl]amino] -3-oxopropoxy]methyl]-1,12,19,25-tetraoxo-16-oxa-13,20,24-t riazanonacos-1-yl]-4-hydroxy-2-pyrrolidinyl)methyl ester
  misc_feature 1..11: note = RNA
  misc_feature 12: note = DNA
catttacttcaa

SEQ ID NO: 118 - DNA, 11 bp, synthetic construct
  source 1..11: mol_type = other DNA
  modified_base 1: mod_base = OTHER; note = 2'-O-methyladenosine-3'-phosphorothioate
  modified_base 2: mod_base = OTHER; note = 2'-O,4'-C-methylene 5-methyluridine-3'-phosphorothioate
  modified_base 3: mod_base = OTHER; note = 2'-O-methyluridine-3'-phosphorothioate
  modified_base 4: mod_base = OTHER; note = 2'-O,4'-C-methylene 5-methyluridine-3'-phosphorothioate
  modified_base 5: mod_base = OTHER; note = 2'-O-methyladenosine-3'-phosphorothioate
  modified_base 6: mod_base = OTHER; note = 2'-O,4'-C-methylene 5-methylcytidine-3'-phosphorothioate
  modified_base 7: mod_base = OTHER; note = 2'-O-methyluridine-3'-phosphorothioate
  modified_base 8: mod_base = OTHER; note = 2'-O,4'-C-methylene 5-methyluridine-3'-phosphorothioate
  modified_base 9: mod_base = OTHER; note = 2'-O,4'-C-methylene 5-methylcytidine-3'-phosphorothioate
  modified_base 10: mod_base = OTHER; note = 2'-O-methyladenosine-3'-phosphate
  modified_base 11: mod_base = OTHER; note = 2'-deoxyadenosine-3'-phosphate ((2S,4R)-1-[29-[[2-(acetylamino)-2-deoxy-beta-D-galactopyra nosyl]oxy]-14,14-bis[[3-[[3-[[5-[[2-(acetylamino)-2-deoxy-b eta-D-galactopyranosyl]oxy]-1-oxopentyl]amino]propyl]amino] -3-oxopropoxy]methyl]-1,12,19,25-tetraoxo-16-oxa-13,20,24-t riazanonacos-1-yl]-4-hydroxy-2-pyrrolidinyl)methyl ester
  misc_feature 1..10: note = RNA
  misc_feature 11: note = DNA
atttacttcaa

SEQ ID NO: 119 - DNA, 10 bp, synthetic construct
  source 1..10: mol_type = other DNA
  modified_base 1: mod_base = OTHER; note = 2'-O,4'-C-methylene 5-methyluridine-3'-phosphorothioate
  modified_base 2: mod_base = OTHER; note = 2'-O-methyluridine-3'-phosphorothioate
  modified_base 3: mod_base = OTHER; note = 2'-O,4'-C-methylene 5-methyluridine-3'-phosphorothioate
  modified_base 4: mod_base = OTHER; note = 2'-O-methyladenosine-3'-phosphorothioate
  modified_base 5: mod_base = OTHER; note = 2'-O,4'-C-methylene 5-methylcytidine-3'-phosphorothioate
  modified_base 6: mod_base = OTHER; note = 2'-O-methyluridine-3'-phosphorothioate
  modified_base 7: mod_base = OTHER; note = 2'-O,4'-C-methylene 5-methyluridine-3'-phosphorothioate
  modified_base 8: mod_base = OTHER; note = 2'-O,4'-C-methylene 5-methylcytidine-3'-phosphorothioate
  modified_base 9: mod_base = OTHER; note = 2'-O-methyladenosine-3'-phosphate
  modified_base 10: mod_base = OTHER; note = 2'-deoxyadenosine-3'-phosphate ((2S,4R)-1-[29-[[2-(acetylamino)-2-deoxy-beta-D-galactopyra nosyl]oxy]-14,14-bis[[3-[[3-[[5-[[2-(acetylamino)-2-deoxy-b eta-D-galactopyranosyl]oxy]-1-oxopentyl]amino]propyl]amino] -3-oxopropoxy]methyl]-1,12,19,25-tetraoxo-16-oxa-13,20,24-t riazanonacos-1-yl]-4-hydroxy-2-pyrrolidinyl)methyl ester
  misc_feature 1..9: note = RNA
  misc_feature 10: note = DNA
tttacttcaa

SEQ ID NO: 120 - RNA, 21 nt, synthetic construct
  source 1..21: mol_type = other RNA
  modified_base 1: mod_base = OTHER; note = 2'-deoxy-2'-fluoroguanosine-3'-phosphorothioate
  modified_base 2: mod_base = OTHER; note = 2'-O-methylguanosine-3'-phosphorothioate
  modified_base 3: mod_base = OTHER; note = 2'-deoxy-2'-fluorouridine-3'-phosphate
  modified_base 4: mod_base = OTHER; note = 2'-O-methyluridine-3'-phosphate
  modified_base 5: mod_base = OTHER; note = 2'-deoxy-2'-fluoroadenosine-3'-phosphate
  modified_base 6: mod_base = OTHER; note = 2'-O-methyladenosine-3'-phosphate
  modified_base 7: mod_base = OTHER; note = 2'-deoxy-2'-fluorocytidine-3'-phosphate
  modified_base 8: mod_base = OTHER; note = 2'-O-methyladenosine-3'-phosphate
  modified_base 9: mod_base = OTHER; note = 2'-deoxy-2'-fluorocytidine-3'-phosphate
  modified_base 10: mod_base = OTHER; note = 2'-deoxy-2'-fluorocytidine-3'-phosphate
  modified_base 11: mod_base = OTHER; note = 2'-deoxy-2'-fluoroadenosine-3'-phosphate
  modified_base 12: mod_base = OTHER; note = 2'-O-methyluridine-3'-phosphate
  modified_base 13: mod_base = OTHER; note = 2'-deoxy-2'-fluorouridine-3'-phosphate
  modified_base 14: mod_base = OTHER; note = 2'-O-methyluridine-3'-phosphate
  modified_base 15: mod_base = OTHER; note = 2'-deoxy-2'-fluoroadenosine-3'-phosphate
  modified_base 16: mod_base = OTHER; note = 2'-O-methylcytidine-3'-phosphate
  modified_base 17: mod_base = OTHER; note = 2'-deoxy-2'-fluorouridine-3'-phosphate
  modified_base 18: mod_base = OTHER; note = 2'-O-methyluridine-3'-phosphate
  modified_base 19: mod_base = OTHER; note = 2'-deoxy-2'-fluorocytidine-3'-phosphate
  modified_base 20: mod_base = OTHER; note = 2'-O-methyladenosine-3'-phosphate
  modified_base 21: mod_base = OTHER; note = 2'-deoxy-2'-fluoroadenosine-3'-phosphate ((2S,4R)-1-[29-[[2-(acetylamino)-2-deoxy-beta-D-galactopyra nosyl]oxy]-14,14-bis[[3-[[3-[[5-[[2-(acetylamino)-2-deoxy-b eta-D-galactopyranosyl]oxy]-1-oxopentyl]amino]propyl]amino] -3-oxopropoxy]methyl]-1,12,19,25-tetraoxo-16-oxa-13,20,24-t riazanonacos-1-yl]-4-hydroxy-2-pyrrolidinyl)methyl ester
ggttaacaccatttacttcaa

SEQ ID NO: 121 - RNA, 23 nt, synthetic construct
  source 1..23: mol_type = other RNA
  modified_base 1: mod_base = OTHER; note = 2'-O-methyluridine-3'-phosphorothioate
  modified_base 2: mod_base = OTHER; note = 2'-deoxy-2'-fluorouridine-3'-phosphorothioate
  modified_base 3: mod_base = OTHER; note = 2'-O-methylguanosine-3'-phosphate
  modified_base 4: mod_base = OTHER; note = 2'-deoxy-2'-fluoroadenosine-3'-phosphate
  modified_base 5: mod_base = OTHER; note = 2'-O-methyladenosine-3'-phosphate
  modified_base 6: mod_base = OTHER; note = 2'-deoxy-2'-fluoroguanosine-3'-phosphate
  modified_base 7: mod_base = OTHER; note = 2'-O-methyluridine-3'-phosphate
  modified_base 8: mod_base = OTHER; note = 2'-deoxy-2'-fluoroadenosine-3'-phosphate
  modified_base 9: mod_base = OTHER; note = 2'-O-methyladenosine-3'-phosphate
  modified_base 10: mod_base = OTHER; note = 2'-deoxy-2'-fluoroadenosine-3'-phosphate
  modified_base 11: mod_base = OTHER; note = 2'-O-methyluridine-3'-phosphate
  modified_base 12: mod_base = OTHER; note = 2'-O-methylguanosine-3'-phosphate
  modified_base 13: mod_base = OTHER; note = 2'-O-methylguanosine-3'-phosphate
  modified_base 14: mod_base = OTHER; note = 2'-deoxy-2'-fluorouridine-3'-phosphate
  modified_base 15: mod_base = OTHER; note = 2'-O-methylguanosine-3'-phosphate
  modified_base 16: mod_base = OTHER; note = 2'-deoxy-2'-fluorouridine-3'-phosphate
  modified_base 17: mod_base = OTHER; note = 2'-O-methyluridine-3'-phosphate
  modified_base 18: mod_base = OTHER; note = 2'-deoxy-2'-fluoroadenosine-3'-phosphate
  modified_base 19: mod_base = OTHER; note = 2'-O-methyladenosine-3'-phosphate
  modified_base 20: mod_base = OTHER; note = 2'-deoxy-2'-fluorocytidine-3'-phosphate
  modified_base 21: mod_base = OTHER; note = 2'-O-methylcytidine-3'-phosphorothioate
  modified_base 22: mod_base = OTHER; note = 2'-O-methyladenosine-3'-phosphorothioate
  modified_base 23: mod_base = OTHER; note = 2'-O-methylguanosine
ttgaagtaaatggtgttaaccag

SEQ ID NO: 122-123 - skipped (2 entries)

SEQ ID NO: 124 - DNA, 12 bp, synthetic construct
  source 1..12: mol_type = other DNA
  modified_base 1: mod_base = OTHER; note = 2'-O-methylcytidine-3'-phosphorothioate
  modified_base 2: mod_base = OTHER; note = 2'-O-methyladenosine-3'-phosphorothioate
  modified_base 3: mod_base = OTHER; note = 2'-O,4'-C-methylene 5-methyluridine-3'-phosphate
  modified_base 4: mod_base = OTHER; note = 2'-O-methyluridine-3'-phosphorothioate
  modified_base 5: mod_base = OTHER; note = 2'-O,4'-C-methylene 5-methyluridine-3'-phosphate
  modified_base 6: mod_base = OTHER; note = 2'-O-methyladenosine-3'-phosphorothioate
  modified_base 7: mod_base = OTHER; note = 2'-O,4'-C-methylene 5-methylcytidine-3'-phosphate
  modified_base 8: mod_base = OTHER; note = 2'-O-methyluridine-3'-phosphorothioate
  modified_base 9: mod_base = OTHER; note = 2'-O,4'-C-methylene 5-methyluridine-3'-phosphate
  modified_base 10: mod_base = OTHER; note = 2'-O,4'-C-methylene 5-methylcytidine-3'-phosphorothioate
  modified_base 11: mod_base = OTHER; note = 2'-O-methyladenosine-3'-phosphate
  modified_base 12: mod_base = OTHER; note = 2'-deoxyadenosine-3'-phosphate ((2S,4R)-1-[29-[[2-(acetylamino)-2-deoxy-beta-D-galactopyra nosyl]oxy]-14,14-bis[[3-[[3-[[5-[[2-(acetylamino)-2-deoxy-b eta-D-galactopyranosyl]oxy]-1-oxopentyl]amino]propyl]amino] -3-oxopropoxy]methyl]-1,12,19,25-tetraoxo-16-oxa-13,20,24-t riazanonacos-1-yl]-4-hydroxy-2-pyrrolidinyl)methyl ester
  misc_feature 1..11: note = RNA
  misc_feature 12: note = DNA
catttacttcaa

SEQ ID NO: 125 - DNA, 10 bp, synthetic construct
  source 1..10: mol_type = other DNA
  modified_base 1: mod_base = OTHER; note = 2'-O,4'-C-methylene 5-methyluridine-3'-phosphorothioate
  modified_base 2: mod_base = OTHER; note = 2'-O-methyluridine-3'-phosphorothioate
  modified_base 3: mod_base = OTHER; note = 2'-O,4'-C-methylene 5-methyluridine-3'-phosphate
  modified_base 4: mod_base = OTHER; note = 2'-O-methyladenosine-3'-phosphorothioate
  modified_base 5: mod_base = OTHER; note = 2'-O,4'-C-methylene 5-methylcytidine-3'-phosphate
  modified_base 6: mod_base = OTHER; note = 2'-O-methyluridine-3'-phosphorothioate
  modified_base 7: mod_base = OTHER; note = 2'-O,4'-C-methylene 5-methyluridine-3'-phosphate
  modified_base 8: mod_base = OTHER; note = 2'-O,4'-C-methylene 5-methylcytidine-3'-phosphorothioate
  modified_base 9: mod_base = OTHER; note = 2'-O-methyladenosine-3'-phosphate
  modified_base 10: mod_base = OTHER; note = 2'-deoxyadenosine-3'-phosphate ((2S,4R)-1-[29-[[2-(acetylamino)-2-deoxy-beta-D-galactopyra nosyl]oxy]-14,14-bis[[3-[[3-[[5-[[2-(acetylamino)-2-deoxy-b eta-D-galactopyranosyl]oxy]-1-oxopentyl]amino]propyl]amino] -3-oxopropoxy]methyl]-1,12,19,25-tetraoxo-16-oxa-13,20,24-t riazanonacos-1-yl]-4-hydroxy-2-pyrrolidinyl)methyl ester
  misc_feature 1..9: note = RNA
  misc_feature 10: note = DNA
tttacttcaa

SEQ ID NO: 126 - DNA, 16 bp, synthetic construct
  source 1..16: mol_type = other DNA
  modified_base 1: mod_base = OTHER; note = 2'-O-methyladenosine-3'-phosphorothioate
  modified_base 2: mod_base = OTHER; note = 2'-O-methylcytidine-3'-phosphorothioate
  modified_base 3: mod_base = OTHER; note = 2'-O-methyladenosine-3'-phosphorothioate
  modified_base 4: mod_base = OTHER; note = 2'-O-methylcytidine-3'-phosphorothioate
  modified_base 5: mod_base = OTHER; note = 2'-O-methylcytidine-3'-phosphorothioate
  modified_base 6: mod_base = OTHER; note = 2'-O-methyladenosine-3'-phosphorothioate
  modified_base 7: mod_base = OTHER; note = 2'-O,4'-C-methylene 5-methyluridine-3'-phosphate
  modified_base 8: mod_base = OTHER; note = 2'-O-methyluridine-3'-phosphorothioate
  modified_base 9: mod_base = OTHER; note = 2'-O,4'-C-methylene 5-methyluridine-3'-phosphate
  modified_base 10: mod_base = OTHER; note = 2'-O-methyladenosine-3'-phosphorothioate
  modified_base 11: mod_base = OTHER; note = 2'-O,4'-C-methylene 5-methylcytidine-3'-phosphate
  modified_base 12: mod_base = OTHER; note = 2'-O-methyluridine-3'-phosphorothioate
  modified_base 13: mod_base = OTHER; note = 2'-O,4'-C-methylene 5-methyluridine-3'-phosphate
  modified_base 14: mod_base = OTHER; note = 2'-O,4'-C-methylene 5-methylcytidine-3'-phosphorothioate
  modified_base 15: mod_base = OTHER; note = 2'-O-methyladenosine-3'-phosphate
  modified_base 16: mod_base = OTHER; note = 2'-deoxyadenosine-3'-phosphate ((2S,4R)-1-[29-[[2-(acetylamino)-2-deoxy-beta-D-galactopyra nosyl]oxy]-14,14-bis[[3-[[3-[[5-[[2-(acetylamino)-2-deoxy-b eta-D-galactopyranosyl]oxy]-1-oxopentyl]amino]propyl]amino] -3-oxopropoxy]methyl]-1,12,19,25-tetraoxo-16-oxa-13,20,24-t riazanonacos-1-yl]-4-hydroxy-2-pyrrolidinyl)methyl ester
  misc_feature 1..15: note = RNA
  misc_feature 16: note = DNA
acaccatttacttcaa

SEQ ID NO: 127 - DNA, 14 bp, synthetic construct
  source 1..14: mol_type = other DNA
  modified_base 1: mod_base = OTHER; note = 2'-O-methyladenosine-3'-phosphorothioate
  modified_base 2: mod_base = OTHER; note = 2'-O-methylcytidine-3'-phosphorothioate
  modified_base 3: mod_base = OTHER; note = 2'-O-methylcytidine-3'-phosphorothioate
  modified_base 4: mod_base = OTHER; note = 2'-O-methyladenosine-3'-phosphorothioate
  modified_base 5: mod_base = OTHER; note = 2'-O,4'-C-methylene 5-methyluridine-3'-phosphate
  modified_base 6: mod_base = OTHER; note = 2'-O-methyluridine-3'-phosphorothioate
  modified_base 7: mod_base = OTHER; note = 2'-O,4'-C-methylene 5-methyluridine-3'-phosphate
  modified_base 8: mod_base = OTHER; note = 2'-O-methyladenosine-3'-phosphorothioate
  modified_base 9: mod_base = OTHER; note = 2'-O,4'-C-methylene 5-methylcytidine-3'-phosphate
  modified_base 10: mod_base = OTHER; note = 2'-O-methyluridine-3'-phosphorothioate
  modified_base 11: mod_base = OTHER; note = 2'-O,4'-C-methylene 5-methyluridine-3'-phosphate
  modified_base 12: mod_base = OTHER; note = 2'-O,4'-C-methylene 5-methylcytidine-3'-phosphorothioate
  modified_base 13: mod_base = OTHER; note = 2'-O-methyladenosine-3'-phosphate
  modified_base 14: mod_base = OTHER; note = 2'-deoxyadenosine-3'-phosphate ((2S,4R)-1-[29-[[2-(acetylamino)-2-deoxy-beta-D-galactopyra nosyl]oxy]-14,14-bis[[3-[[3-[[5-[[2-(acetylamino)-2-deoxy-b eta-D-galactopyranosyl]oxy]-1-oxopentyl]amino]propyl]amino] -3-oxopropoxy]methyl]-1,12,19,25-tetraoxo-16-oxa-13,20,24-t riazanonacos-1-yl]-4-hydroxy-2-pyrrolidinyl)methyl ester
  misc_feature 1..13: note = RNA
  misc_feature 14: note = DNA
accatttacttcaa

SEQ ID NO: 128 - DNA, 23 bp, synthetic construct
  source 1..23: mol_type = other DNA
  modified_base 1: mod_base = OTHER; note = 2'-O-methyluridine-3'-phosphorothioate
  modified_base 2: mod_base = OTHER; note = 2'-O-methyluridine-3'-phosphorothioate
  modified_base 3: mod_base = OTHER; note = 2'-O-methylcytidine-3'-phosphorothioate
  modified_base 4: mod_base = OTHER; note = 2'-O-methyladenosine-3'-phosphorothioate
  modified_base 5: mod_base = OTHER; note = 2'-O-methylguanosine-3'-phosphorothioate
  modified_base 6: mod_base = OTHER; note = 2'-O-methyluridine-3'-phosphorothioate
  modified_base 7: mod_base = OTHER; note = 2'-O-methyladenosine-3'-phosphorothioate
  modified_base 8: mod_base = OTHER; note = 2'-O-methylcytidine-3'-phosphorothioate
  modified_base 9: mod_base = OTHER; note = 2'-O-methylcytidine-3'-phosphorothioate
  modified_base 10: mod_base = OTHER; note = 2'-O-methyluridine-3'-phosphorothioate
  modified_base 11: mod_base = OTHER; note = 2'-O-methyluridine-3'-phosphorothioate
  modified_base 12: mod_base = OTHER; note = 2'-O-methyladenosine-3'-phosphorothioate
  modified_base 13: mod_base = OTHER; note = 2'-O-methylguanosine-3'-phosphorothioate
  modified_base 14: mod_base = OTHER; note = 2'-O-methyladenosine-3'-phosphorothioate
  modified_base 15: mod_base = OTHER; note = 2'-O-methylguanosine-3'-phosphorothioate
  modified_base 16: mod_base = OTHER; note = 2'-O-methyluridine-3'-phosphorothioate
  modified_base 17: mod_base = OTHER; note = 2'-O-methyluridine-3'-phosphorothioate
  modified_base 18: mod_base = OTHER; note = 2'-O-methylcytidine-3'-phosphorothioate
  modified_base 19: mod_base = OTHER; note = 2'-O-methylcytidine-3'-phosphorothioate
  modified_base 20: mod_base = OTHER; note = 2'-O-methyladenosine-3'-phosphorothioate
  modified_base 21: mod_base = OTHER; note = 2'-O-methylcytidine-3'-phosphorothioate
  modified_base 22: mod_base = OTHER; note = 2'-O-methyluridine-3'-phosphorothioate
  modified_base 23: mod_base = OTHER; note = 2'-deoxyadenosine-3'-phosphate ((2S,4R)-1-[29-[[2-(acetylamino)-2-deoxy-beta-D-galactopyra nosyl]oxy]-14,14-bis[[3-[[3-[[5-[[2-(acetylamino)-2-deoxy-b eta-D-galactopyranosyl]oxy]-1-oxopentyl]amino]propyl]amino] -3-oxopropoxy]methyl]-1,12,19,25-tetraoxo-16-oxa-13,20,24-t riazanonacos-1-yl]-4-hydroxy-2-pyrrolidinyl)methyl ester
  misc_feature 1..22: note = RNA
  misc_feature 23: note = DNA
ttcagtaccttagagttccacta

SEQ ID NO: 129 - DNA, 23 bp, synthetic construct
  source 1..23: mol_type = other DNA
  modified_base 1: mod_base = OTHER; note = 2'-O-methyluridine-3'-phosphorothioate
  modified_base 2: mod_base = OTHER; note = 2'-O-methyluridine-3'-phosphorothioate
  modified_base 3: mod_base = OTHER; note = 2'-O-methylcytidine-3'-phosphorothioate
  modified_base 4: mod_base = OTHER; note = 2'-O-methyladenosine-3'-phosphorothioate
  modified_base 5: mod_base = OTHER; note = 2'-O-methylguanosine-3'-phosphorothioate
  modified_base 6: mod_base = OTHER; note = 2'-O-methyluridine-3'-phosphorothioate
  modified_base 7: mod_base = OTHER; note = 2'-O-methyladenosine-3'-phosphorothioate
  modified_base 8: mod_base = OTHER; note = 2'-O-methylcytidine-3'-phosphorothioate
  modified_base 9: mod_base = OTHER; note = 2'-O-methylcytidine-3'-phosphorothioate
  modified_base 10: mod_base = OTHER; note = 2'-O-methyluridine-3'-phosphorothioate
  modified_base 11: mod_base = OTHER; note = 2'-O-methyluridine-3'-phosphorothioate
  modified_base 12: mod_base = OTHER; note = 2'-O-methyladenosine-3'-phosphorothioate
  modified_base 13: mod_base = OTHER; note = 2'-O-methylguanosine-3'-phosphorothioate
  modified_base 14: mod_base = OTHER; note = 2'-O-methyladenosine-3'-phosphorothioate
  modified_base 15: mod_base = OTHER; note = 2'-O-methylguanosine-3'-phosphorothioate
  modified_base 16: mod_base = OTHER; note = 2'-O-methyluridine-3'-phosphorothioate
  modified_base 17: mod_base = OTHER; note = 2'-O-methyluridine-3'-phosphorothioate
  modified_base 18: mod_base = OTHER; note = 2'-O-methylcytidine-3'-phosphorothioate
  modified_base 19: mod_base = OTHER; note = 2'-O-methylcytidine-3'-phosphorothioate
  modified_base 20: mod_base = OTHER; note = 2'-O-methyladenosine-3'-phosphorothioate
  modified_base 21: mod_base = OTHER; note = 2'-O-methylcytidine-3'-phosphorothioate
  modified_base 22: mod_base = OTHER; note = 2'-O,4'-C-methylene 5-methyluridine-3'-phosphate
  modified_base 23: mod_base = OTHER; note = 2'-deoxyadenosine-3'-phosphate ((2S,4R)-1-[29-[[2-(acetylamino)-2-deoxy-beta-D-galactopyra nosyl]oxy]-14,14-bis[[3-[[3-[[5-[[2-(acetylamino)-2-deoxy-b eta-D-galactopyranosyl]oxy]-1-oxopentyl]amino]propyl]amino] -3-oxopropoxy]methyl]-1,12,19,25-tetraoxo-16-oxa-13,20,24-t riazanonacos-1-yl]-4-hydroxy-2-pyrrolidinyl)methyl ester
  misc_feature 1..22: note = RNA
  misc_feature 23: note = DNA
ttcagtaccttagagttccacta

SEQ ID NO: 130 - DNA, 23 bp, synthetic construct
  source 1..23: mol_type = other DNA
  modified_base 1: mod_base = OTHER; note = 2'-O-methyluridine-3'-phosphorothioate
  modified_base 2: mod_base = OTHER; note = 2'-O-methyluridine-3'-phosphorothioate
  modified_base 3: mod_base = OTHER; note = 2'-O-methylcytidine-3'-phosphorothioate
  modified_base 4: mod_base = OTHER; note = 2'-O-methyladenosine-3'-phosphorothioate
  modified_base 5: mod_base = OTHER; note = 2'-O-methylguanosine-3'-phosphorothioate
  modified_base 6: mod_base = OTHER; note = 2'-O-methyluridine-3'-phosphorothioate
  modified_base 7: mod_base = OTHER; note = 2'-O-methyladenosine-3'-phosphorothioate
  modified_base 8: mod_base = OTHER; note = 2'-O-methylcytidine-3'-phosphorothioate
  modified_base 9: mod_base = OTHER; note = 2'-O-methylcytidine-3'-phosphorothioate
  modified_base 10: mod_base = OTHER; note = 2'-O-methyluridine-3'-phosphorothioate
  modified_base 11: mod_base = OTHER; note = 2'-O-methyluridine-3'-phosphorothioate
  modified_base 12: mod_base = OTHER; note = 2'-O-methyladenosine-3'-phosphorothioate
  modified_base 13: mod_base = OTHER; note = 2'-O-methylguanosine-3'-phosphorothioate
  modified_base 14: mod_base = OTHER; note = 2'-O-methyladenosine-3'-phosphorothioate
  modified_base 15: mod_base = OTHER; note = 2'-O-methylguanosine-3'-phosphorothioate
  modified_base 16: mod_base = OTHER; note = 2'-O-methyluridine-3'-phosphorothioate
  modified_base 17: mod_base = OTHER; note = 2'-O-methyluridine-3'-phosphorothioate
  modified_base 18: mod_base = OTHER; note = 2'-O-methylcytidine-3'-phosphorothioate
  modified_base 19: mod_base = OTHER; note = 2'-O-methylcytidine-3'-phosphorothioate
  modified_base 20: mod_base = OTHER; note = 2'-O-methyladenosine-3'-phosphorothioate
  modified_base 21: mod_base = OTHER; note = 2'-O,4'-C-methylene 5-methylcytidine-3'-phosphorothioate
  modified_base 22: mod_base = OTHER; note = 2'-O,4'-C-methylene 5-methyluridine-3'-phosphate
  modified_base 23: mod_base = OTHER; note = 2'-deoxyadenosine-3'-phosphate ((2S,4R)-1-[29-[[2-(acetylamino)-2-deoxy-beta-D-galactopyra nosyl]oxy]-14,14-bis[[3-[[3-[[5-[[2-(acetylamino)-2-deoxy-b eta-D-galactopyranosyl]oxy]-1-oxopentyl]amino]propyl]amino] -3-oxopropoxy]methyl]-1,12,19,25-tetraoxo-16-oxa-13,20,24-t riazanonacos-1-yl]-4-hydroxy-2-pyrrolidinyl)methyl ester
  misc_feature 1..22: note = RNA
  misc_feature 23: note = DNA
ttcagtaccttagagttccacta

SEQ ID NO: 131 - DNA, 23 bp, synthetic construct
  source 1..23: mol_type = other DNA
  modified_base 1: mod_base = OTHER; note = 2'-O-methyluridine-3'-phosphorothioate
  modified_base 2: mod_base = OTHER; note = 2'-O-methyluridine-3'-phosphorothioate
  modified_base 3: mod_base = OTHER; note = 2'-O-methylcytidine-3'-phosphorothioate
  modified_base 4: mod_base = OTHER; note = 2'-O-methyladenosine-3'-phosphorothioate
  modified_base 5: mod_base = OTHER; note = 2'-O-methylguanosine-3'-phosphorothioate
  modified_base 6: mod_base = OTHER; note = 2'-O-methyluridine-3'-phosphorothioate
  modified_base 7: mod_base = OTHER; note = 2'-O-methyladenosine-3'-phosphorothioate
  modified_base 8: mod_base = OTHER; note = 2'-O-methylcytidine-3'-phosphorothioate
  modified_base 9: mod_base = OTHER; note = 2'-O-methylcytidine-3'-phosphorothioate
  modified_base 10: mod_base = OTHER; note = 2'-O-methyluridine-3'-phosphorothioate
  modified_base 11: mod_base = OTHER; note = 2'-O-methyluridine-3'-phosphorothioate
  modified_base 12: mod_base = OTHER; note = 2'-O-methyladenosine-3'-phosphorothioate
  modified_base 13: mod_base = OTHER; note = 2'-O-methylguanosine-3'-phosphorothioate
  modified_base 14: mod_base = OTHER; note = 2'-O-methyladenosine-3'-phosphorothioate
  modified_base 15: mod_base = OTHER; note = 2'-O-methylguanosine-3'-phosphorothioate
  modified_base 16: mod_base = OTHER; note = 2'-O-methyluridine-3'-phosphorothioate
  modified_base 17: mod_base = OTHER; note = 2'-O-methyluridine-3'-phosphorothioate
  modified_base 18: mod_base = OTHER; note = 2'-O-methylcytidine-3'-phosphorothioate
  modified_base 19: mod_base = OTHER; note = 2'-O,4'-C-methylene 5-methylcytidine-3'-phosphorothioate
  modified_base 20: mod_base = OTHER; note = 2'-O-methyladenosine-3'-phosphorothioate
  modified_base 21: mod_base = OTHER; note = 2'-O,4'-C-methylene 5-methylcytidine-3'-phosphorothioate
  modified_base 22: mod_base = OTHER; note = 2'-O,4'-C-methylene 5-methyluridine-3'-phosphate
  modified_base 23: mod_base = OTHER; note = 2'-deoxyadenosine-3'-phosphate ((2S,4R)-1-[29-[[2-(acetylamino)-2-deoxy-beta-D-galactopyra nosyl]oxy]-14,14-bis[[3-[[3-[[5-[[2-(acetylamino)-2-deoxy-b eta-D-galactopyranosyl]oxy]-1-oxopentyl]amino]propyl]amino] -3-oxopropoxy]methyl]-1,12,19,25-tetraoxo-16-oxa-13,20,24-t riazanonacos-1-yl]-4-hydroxy-2-pyrrolidinyl)methyl ester
  misc_feature 1..22: note = RNA
  misc_feature 23: note = DNA
ttcagtaccttagagttccacta

SEQ ID NO: 132 - DNA, 23 bp, synthetic construct
  source 1..23: mol_type = other DNA
  modified_base 1: mod_base = OTHER; note = 2'-O-methyluridine-3'-phosphorothioate
  modified_base 2: mod_base = OTHER; note = 2'-O-methyluridine-3'-phosphorothioate
  modified_base 3: mod_base = OTHER; note = 2'-O-methylcytidine-3'-phosphorothioate
  modified_base 4: mod_base = OTHER; note = 2'-O-methyladenosine-3'-phosphorothioate
  modified_base 5: mod_base = OTHER; note = 2'-O-methylguanosine-3'-phosphorothioate
  modified_base 6: mod_base = OTHER; note = 2'-O-methyluridine-3'-phosphorothioate
  modified_base 7: mod_base = OTHER; note = 2'-O-methyladenosine-3'-phosphorothioate
  modified_base 8: mod_base = OTHER; note = 2'-O-methylcytidine-3'-phosphorothioate
  modified_base 9: mod_base = OTHER; note = 2'-O-methylcytidine-3'-phosphorothioate
  modified_base 10: mod_base = OTHER; note = 2'-O-methyluridine-3'-phosphorothioate
  modified_base 11: mod_base = OTHER; note = 2'-O-methyluridine-3'-phosphorothioate
  modified_base 12: mod_base = OTHER; note = 2'-O-methyladenosine-3'-phosphorothioate
  modified_base 13: mod_base = OTHER; note = 2'-O-methylguanosine-3'-phosphorothioate
  modified_base 14: mod_base = OTHER; note = 2'-O-methyladenosine-3'-phosphorothioate
  modified_base 15: mod_base = OTHER; note = 2'-O-methylguanosine-3'-phosphorothioate
  modified_base 16: mod_base = OTHER; note = 2'-O-methyluridine-3'-phosphorothioate
  modified_base 17: mod_base = OTHER; note = 2'-O,4'-C-methylene 5-methyluridine-3'-phosphorothioate
  modified_base 18: mod_base = OTHER; note = 2'-O-methylcytidine-3'-phosphorothioate
  modified_base 19: mod_base = OTHER; note = 2'-O,4'-C-methylene 5-methylcytidine-3'-phosphorothioate
  modified_base 20: mod_base = OTHER; note = 2'-O-methyladenosine-3'-phosphorothioate
  modified_base 21: mod_base = OTHER; note = 2'-O,4'-C-methylene 5-methylcytidine-3'-phosphorothioate
  modified_base 22: mod_base = OTHER; note = 2'-O,4'-C-methylene 5-methyluridine-3'-phosphate
  modified_base 23: mod_base = OTHER; note = 2'-deoxyadenosine-3'-phosphate ((2S,4R)-1-[29-[[2-(acetylamino)-2-deoxy-beta-D-galactopyra nosyl]oxy]-14,14-bis[[3-[[3-[[5-[[2-(acetylamino)-2-deoxy-b eta-D-galactopyranosyl]oxy]-1-oxopentyl]amino]propyl]amino] -3-oxopropoxy]methyl]-1,12,19,25-tetraoxo-16-oxa-13,20,24-t riazanonacos-1-yl]-4-hydroxy-2-pyrrolidinyl)methyl ester
  misc_feature 1..22: note = RNA
  misc_feature 23: note = DNA
ttcagtaccttagagttccacta

SEQ ID NO: 133 - DNA, 23 bp, synthetic construct
  source 1..23: mol_type = other DNA
  modified_base 1: mod_base = OTHER; note = 2'-O-methyluridine-3'-phosphorothioate
  modified_base 2: mod_base = OTHER; note = 2'-O-methyluridine-3'-phosphorothioate
  modified_base 3: mod_base = OTHER; note = 2'-O-methylcytidine-3'-phosphorothioate
  modified_base 4: mod_base = OTHER; note = 2'-O-methyladenosine-3'-phosphorothioate
  modified_base 5: mod_base = OTHER; note = 2'-O-methylguanosine-3'-phosphorothioate
  modified_base 6: mod_base = OTHER; note = 2'-O-methyluridine-3'-phosphorothioate
  modified_base 7: mod_base = OTHER; note = 2'-O-methyladenosine-3'-phosphorothioate
  modified_base 8: mod_base = OTHER; note = 2'-O-methylcytidine-3'-phosphorothioate
  modified_base 9: mod_base = OTHER; note = 2'-O-methylcytidine-3'-phosphorothioate
  modified_base 10: mod_base = OTHER; note = 2'-O-methyluridine-3'-phosphorothioate
  modified_base 11: mod_base = OTHER; note = 2'-O-methyluridine-3'-phosphorothioate
  modified_base 12: mod_base = OTHER; note = 2'-O-methyladenosine-3'-phosphorothioate
  modified_base 13: mod_base = OTHER; note = 2'-O-methylguanosine-3'-phosphorothioate
  modified_base 14: mod_base = OTHER; note = 2'-O-methyladenosine-3'-phosphorothioate
  modified_base 15: mod_base = OTHER; note = 2'-O-methylguanosine-3'-phosphorothioate
  modified_base 16: mod_base = OTHER; note = 2'-O,4'-C-methylene 5-methyluridine-3'-phosphorothioate
  modified_base 17: mod_base = OTHER; note = 2'-O,4'-C-methylene 5-methyluridine-3'-phosphorothioate
  modified_base 18: mod_base = OTHER; note = 2'-O-methylcytidine-3'-phosphorothioate
  modified_base 19: mod_base = OTHER; note = 2'-O,4'-C-methylene 5-methylcytidine-3'-phosphorothioate
  modified_base 20: mod_base = OTHER; note = 2'-O-methyladenosine-3'-phosphorothioate
  modified_base 21: mod_base = OTHER; note = 2'-O,4'-C-methylene 5-methylcytidine-3'-phosphorothioate
  modified_base 22: mod_base = OTHER; note = 2'-O,4'-C-methylene 5-methyluridine-3'-phosphate
  modified_base 23: mod_base = OTHER; note = 2'-deoxyadenosine-3'-phosphate ((2S,4R)-1-[29-[[2-(acetylamino)-2-deoxy-beta-D-galactopyra nosyl]oxy]-14,14-bis[[3-[[3-[[5-[[2-(acetylamino)-2-deoxy-b eta-D-galactopyranosyl]oxy]-1-oxopentyl]amino]propyl]amino] -3-oxopropoxy]methyl]-1,12,19,25-tetraoxo-16-oxa-13,20,24-t riazanonacos-1-yl]-4-hydroxy-2-pyrrolidinyl)methyl ester
  misc_feature 1..22: note = RNA
  misc_feature 23: note = DNA
ttcagtaccttagagttccacta

SEQ ID NO: 134 - DNA, 23 bp, synthetic construct
  source 1..23: mol_type = other DNA
  modified_base 1: mod_base = OTHER; note = 2'-O-methyluridine-3'-phosphorothioate
  modified_base 2: mod_base = OTHER; note = 2'-O-methyluridine-3'-phosphorothioate
  modified_base 3: mod_base = OTHER; note = 2'-O-methylcytidine-3'-phosphorothioate
  modified_base 4: mod_base = OTHER; note = 2'-O-methyladenosine-3'-phosphorothioate
  modified_base 5: mod_base = OTHER; note = 2'-O-methylguanosine-3'-phosphorothioate
  modified_base 6: mod_base = OTHER; note = 2'-O-methyluridine-3'-phosphorothioate
  modified_base 7: mod_base = OTHER; note = 2'-O-methyladenosine-3'-phosphorothioate
  modified_base 8: mod_base = OTHER; note = 2'-O-methylcytidine-3'-phosphorothioate
  modified_base 9: mod_base = OTHER; note = 2'-O-methylcytidine-3'-phosphorothioate
  modified_base 10: mod_base = OTHER; note = 2'-O-methyluridine-3'-phosphorothioate
  modified_base 11: mod_base = OTHER; note = 2'-O,4'-C-methylene 5-methyluridine-3'-phosphorothioate
  modified_base 12: mod_base = OTHER; note = 2'-O-methyladenosine-3'-phosphorothioate
  modified_base 13: mod_base = OTHER; note = 2'-O-methylguanosine-3'-phosphorothioate
  modified_base 14: mod_base = OTHER; note = 2'-O-methyladenosine-3'-phosphorothioate
  modified_base 15: mod_base = OTHER; note = 2'-O-methylguanosine-3'-phosphorothioate
  modified_base 16: mod_base = OTHER; note = 2'-O,4'-C-methylene 5-methyluridine-3'-phosphorothioate
  modified_base 17: mod_base = OTHER; note = 2'-O,4'-C-methylene 5-methyluridine-3'-phosphorothioate
  modified_base 18: mod_base = OTHER; note = 2'-O-methylcytidine-3'-phosphorothioate
  modified_base 19: mod_base = OTHER; note = 2'-O,4'-C-methylene 5-methylcytidine-3'-phosphorothioate
  modified_base 20: mod_base = OTHER; note = 2'-O-methyladenosine-3'-phosphorothioate
  modified_base 21: mod_base = OTHER; note = 2'-O,4'-C-methylene 5-methylcytidine-3'-phosphorothioate
  modified_base 22: mod_base = OTHER; note = 2'-O,4'-C-methylene 5-methyluridine-3'-phosphate
  modified_base 23: mod_base = OTHER; note = 2'-deoxyadenosine-3'-phosphate ((2S,4R)-1-[29-[[2-(acetylamino)-2-deoxy-beta-D-galactopyra nosyl]oxy]-14,14-bis[[3-[[3-[[5-[[2-(acetylamino)-2-deoxy-b eta-D-galactopyranosyl]oxy]-1-oxopentyl]amino]propyl]amino] -3-oxopropoxy]methyl]-1,12,19,25-tetraoxo-16-oxa-13,20,24-t riazanonacos-1-yl]-4-hydroxy-2-pyrrolidinyl)methyl ester
  misc_feature 1..22: note = RNA
  misc_feature 23: note = DNA
ttcagtaccttagagttccacta

SEQ ID NO: 135 - DNA, 23 bp, synthetic construct
  source 1..23: mol_type = other DNA
  modified_base 1: mod_base = OTHER; note = 2'-O-methyluridine-3'-phosphorothioate
  modified_base 2: mod_base = OTHER; note = 2'-O-methyluridine-3'-phosphorothioate
  modified_base 3: mod_base = OTHER; note = 2'-O-methylcytidine-3'-phosphorothioate
  modified_base 4: mod_base = OTHER; note = 2'-O-methyladenosine-3'-phosphorothioate
  modified_base 5: mod_base = OTHER; note = 2'-O-methylguanosine-3'-phosphorothioate
  modified_base 6: mod_base = OTHER; note = 2'-O-methyluridine-3'-phosphorothioate
  modified_base 7: mod_base = OTHER; note = 2'-O-methyladenosine-3'-phosphorothioate
  modified_base 8: mod_base = OTHER; note = 2'-O,4'-C-methylene 5-methylcytidine-3'-phosphorothioate
  modified_base 9: mod_base = OTHER; note = 2'-O-methylcytidine-3'-phosphorothioate
  modified_base 10: mod_base = OTHER; note = 2'-O-methyluridine-3'-phosphorothioate
  modified_base 11: mod_base = OTHER; note = 2'-O,4'-C-methylene 5-methyluridine-3'-phosphorothioate
  modified_base 12: mod_base = OTHER; note = 2'-O-methyladenosine-3'-phosphorothioate
  modified_base 13: mod_base = OTHER; note = 2'-O-methylguanosine-3'-phosphorothioate
  modified_base 14: mod_base = OTHER; note = 2'-O-methyladenosine-3'-phosphorothioate
  modified_base 15: mod_base = OTHER; note = 2'-O-methylguanosine-3'-phosphorothioate
  modified_base 16: mod_base = OTHER; note = 2'-O,4'-C-methylene 5-methyluridine-3'-phosphorothioate
  modified_base 17: mod_base = OTHER; note = 2'-O,4'-C-methylene 5-methyluridine-3'-phosphorothioate
  modified_base 18: mod_base = OTHER; note = 2'-O-methylcytidine-3'-phosphorothioate
  modified_base 19: mod_base = OTHER; note = 2'-O,4'-C-methylene 5-methylcytidine-3'-phosphorothioate
  modified_base 20: mod_base = OTHER; note = 2'-O-methyladenosine-3'-phosphorothioate
  modified_base 21: mod_base = OTHER; note = 2'-O,4'-C-methylene 5-methylcytidine-3'-phosphorothioate
  modified_base 22: mod_base = OTHER; note = 2'-O,4'-C-methylene 5-methyluridine-3'-phosphate
  modified_base 23: mod_base = OTHER; note = 2'-deoxyadenosine-3'-phosphate ((2S,4R)-1-[29-[[2-(acetylamino)-2-deoxy-beta-D-galactopyra nosyl]oxy]-14,14-bis[[3-[[3-[[5-[[2-(acetylamino)-2-deoxy-b eta-D-galactopyranosyl]oxy]-1-oxopentyl]amino]propyl]amino] -3-oxopropoxy]methyl]-1,12,19,25-tetraoxo-16-oxa-13,20,24-t riazanonacos-1-yl]-4-hydroxy-2-pyrrolidinyl)methyl ester
  misc_feature 1..22: note = RNA
  misc_feature 23: note = DNA
ttcagtaccttagagttccacta

SEQ ID NO: 136 - DNA, 22 bp, synthetic construct
  source 1..22: mol_type = other DNA
  modified_base 1: mod_base = OTHER; note = 2'-O-methyluridine-3'-phosphorothioate
  modified_base 2: mod_base = OTHER; note = 2'-O-methylcytidine-3'-phosphorothioate
  modified_base 3: mod_base = OTHER; note = 2'-O-methyladenosine-3'-phosphorothioate
  modified_base 4: mod_base = OTHER; note = 2'-O-methylguanosine-3'-phosphorothioate
  modified_base 5: mod_base = OTHER; note = 2'-O-methyluridine-3'-phosphorothioate
  modified_base 6: mod_base = OTHER; note = 2'-O-methyladenosine-3'-phosphorothioate
  modified_base 7: mod_base = OTHER; note = 2'-O-methylcytidine-3'-phosphorothioate
  modified_base 8: mod_base = OTHER; note = 2'-O-methylcytidine-3'-phosphorothioate
  modified_base 9: mod_base = OTHER; note = 2'-O-methyluridine-3'-phosphorothioate
  modified_base 10: mod_base = OTHER; note = 2'-O-methyluridine-3'-phosphorothioate
  modified_base 11: mod_base = OTHER; note = 2'-O-methyladenosine-3'-phosphorothioate
  modified_base 12: mod_base = OTHER; note = 2'-O-methylguanosine-3'-phosphorothioate
  modified_base 13: mod_base = OTHER; note = 2'-O-methyladenosine-3'-phosphorothioate
  modified_base 14: mod_base = OTHER; note = 2'-O-methylguanosine-3'-phosphorothioate
  modified_base 15: mod_base = OTHER; note = 2'-O,4'-C-methylene 5-methyluridine-3'-phosphorothioate
  modified_base 16: mod_base = OTHER; note = 2'-O,4'-C-methylene 5-methyluridine-3'-phosphorothioate
  modified_base 17: mod_base = OTHER; note = 2'-O-methylcytidine-3'-phosphorothioate
  modified_base 18: mod_base = OTHER; note = 2'-O,4'-C-methylene 5-methylcytidine-3'-phosphorothioate
  modified_base 19: mod_base = OTHER; note = 2'-O-methyladenosine-3'-phosphorothioate
  modified_base 20: mod_base = OTHER; note = 2'-O,4'-C-methylene 5-methylcytidine-3'-phosphorothioate
  modified_base 21: mod_base = OTHER; note = 2'-O,4'-C-methylene 5-methyluridine-3'-phosphate
  modified_base 22: mod_base = OTHER; note = 2'-deoxyadenosine-3'-phosphate ((2S,4R)-1-[29-[[2-(acetylamino)-2-deoxy-beta-D-galactopyra nosyl]oxy]-14,14-bis[[3-[[3-[[5-[[2-(acetylamino)-2-deoxy-b eta-D-galactopyranosyl]oxy]-1-oxopentyl]amino]propyl]amino] -3-oxopropoxy]methyl]-1,12,19,25-tetraoxo-16-oxa-13,20,24-t riazanonacos-1-yl]-4-hydroxy-2-pyrrolidinyl)methyl ester
  misc_feature 1..21: note = RNA
  misc_feature 22: note = DNA
tcagtaccttagagttccacta

SEQ ID NO: 137 - DNA, 21 bp, synthetic construct
  source 1..21: mol_type = other DNA
  modified_base 1: mod_base = OTHER; note = 2'-O-methylcytidine-3'-phosphorothioate
  modified_base 2: mod_base = OTHER; note = 2'-O-methyladenosine-3'-phosphorothioate
  modified_base 3: mod_base = OTHER; note = 2'-O-methylguanosine-3'-phosphorothioate
  modified_base 4: mod_base = OTHER; note = 2'-O-methyluridine-3'-phosphorothioate
  modified_base 5: mod_base = OTHER; note = 2'-O-methyladenosine-3'-phosphorothioate
  modified_base 6: mod_base = OTHER; note = 2'-O-methylcytidine-3'-phosphorothioate
  modified_base 7: mod_base = OTHER; note = 2'-O-methylcytidine-3'-phosphorothioate
  modified_base 8: mod_base = OTHER; note = 2'-O-methyluridine-3'-phosphorothioate
  modified_base 9: mod_base = OTHER; note = 2'-O-methyluridine-3'-phosphorothioate
  modified_base 10: mod_base = OTHER; note = 2'-O-methyladenosine-3'-phosphorothioate
  modified_base 11: mod_base = OTHER; note = 2'-O-methylguanosine-3'-phosphorothioate
  modified_base 12: mod_base = OTHER; note = 2'-O-methyladenosine-3'-phosphorothioate
  modified_base 13: mod_base = OTHER; note = 2'-O-methylguanosine-3'-phosphorothioate
  modified_base 14: mod_base = OTHER; note = 2'-O,4'-C-methylene 5-methyluridine-3'-phosphorothioate
  modified_base 15: mod_base = OTHER; note = 2'-O,4'-C-methylene 5-methyluridine-3'-phosphorothioate
  modified_base 16: mod_base = OTHER; note = 2'-O-methylcytidine-3'-phosphorothioate
  modified_base 17: mod_base = OTHER; note = 2'-O,4'-C-methylene 5-methylcytidine-3'-phosphorothioate
  modified_base 18: mod_base = OTHER; note = 2'-O-methyladenosine-3'-phosphorothioate
  modified_base 19: mod_base = OTHER; note = 2'-O,4'-C-methylene 5-methylcytidine-3'-phosphorothioate
  modified_base 20: mod_base = OTHER; note = 2'-O,4'-C-methylene 5-methyluridine-3'-phosphate
  modified_base 21: mod_base = OTHER; note = 2'-deoxyadenosine-3'-phosphate ((2S,4R)-1-[29-[[2-(acetylamino)-2-deoxy-beta-D-galactopyra nosyl]oxy]-14,14-bis[[3-[[3-[[5-[[2-(acetylamino)-2-deoxy-b eta-D-galactopyranosyl]oxy]-1-oxopentyl]amino]propyl]amino] -3-oxopropoxy]methyl]-1,12,19,25-tetraoxo-16-oxa-13,20,24-t riazanonacos-1-yl]-4-hydroxy-2-pyrrolidinyl)methyl ester
  misc_feature 1..20: note = RNA
  misc_feature 21: note = DNA
cagtaccttagagttccacta

SEQ ID NO: 138 - DNA, 20 bp, synthetic construct
  source 1..20: mol_type = other DNA
  modified_base 1: mod_base = OTHER; note = 2'-O-methyladenosine-3'-phosphorothioate
  modified_base 2: mod_base = OTHER; note = 2'-O-methylguanosine-3'-phosphorothioate
  modified_base 3: mod_base = OTHER; note = 2'-O-methyluridine-3'-phosphorothioate
  modified_base 4: mod_base = OTHER; note = 2'-O-methyladenosine-3'-phosphorothioate
  modified_base 5: mod_base = OTHER; note = 2'-O-methylcytidine-3'-phosphorothioate
  modified_base 6: mod_base = OTHER; note = 2'-O-methylcytidine-3'-phosphorothioate
  modified_base 7: mod_base = OTHER; note = 2'-O-methyluridine-3'-phosphorothioate
  modified_base 8: mod_base = OTHER; note = 2'-O-methyluridine-3'-phosphorothioate
  modified_base 9: mod_base = OTHER; note = 2'-O-methyladenosine-3'-phosphorothioate
  modified_base 10: mod_base = OTHER; note = 2'-O-methylguanosine-3'-phosphorothioate
  modified_base 11: mod_base = OTHER; note = 2'-O-methyladenosine-3'-phosphorothioate
  modified_base 12: mod_base = OTHER; note = 2'-O-methylguanosine-3'-phosphorothioate
  modified_base 13: mod_base = OTHER; note = 2'-O,4'-C-methylene 5-methyluridine-3'-phosphorothioate
  modified_base 14: mod_base = OTHER; note = 2'-O,4'-C-methylene 5-methyluridine-3'-phosphorothioate
  modified_base 15: mod_base = OTHER; note = 2'-O-methylcytidine-3'-phosphorothioate
  modified_base 16: mod_base = OTHER; note = 2'-O,4'-C-methylene 5-methylcytidine-3'-phosphorothioate
  modified_base 17: mod_base = OTHER; note = 2'-O-methyladenosine-3'-phosphorothioate
  modified_base 18: mod_base = OTHER; note = 2'-O,4'-C-methylene 5-methylcytidine-3'-phosphorothioate
  modified_base 19: mod_base = OTHER; note = 2'-O,4'-C-methylene 5-methyluridine-3'-phosphate
  modified_base 20: mod_base = OTHER; note = 2'-deoxyadenosine-3'-phosphate ((2S,4R)-1-[29-[[2-(acetylamino)-2-deoxy-beta-D-galactopyra nosyl]oxy]-14,14-bis[[3-[[3-[[5-[[2-(acetylamino)-2-deoxy-b eta-D-galactopyranosyl]oxy]-1-oxopentyl]amino]propyl]amino] -3-oxopropoxy]methyl]-1,12,19,25-tetraoxo-16-oxa-13,20,24-t riazanonacos-1-yl]-4-hydroxy-2-pyrrolidinyl)methyl ester
  misc_feature 1..19: note = RNA
  misc_feature 20: note = DNA
agtaccttagagttccacta

SEQ ID NO: 139 - DNA, 19 bp, synthetic construct
  source 1..19: mol_type = other DNA
  modified_base 1: mod_base = OTHER; note = 2'-O-methylguanosine-3'-phosphorothioate
  modified_base 2: mod_base = OTHER; note = 2'-O-methyluridine-3'-phosphorothioate
  modified_base 3: mod_base = OTHER; note = 2'-O-methyladenosine-3'-phosphorothioate
  modified_base 4: mod_base = OTHER; note = 2'-O-methylcytidine-3'-phosphorothioate
  modified_base 5: mod_base = OTHER; note = 2'-O-methylcytidine-3'-phosphorothioate
  modified_base 6: mod_base = OTHER; note = 2'-O-methyluridine-3'-phosphorothioate
  modified_base 7: mod_base = OTHER; note = 2'-O-methyluridine-3'-phosphorothioate
  modified_base 8: mod_base = OTHER; note = 2'-O-methyladenosine-3'-phosphorothioate
  modified_base 9: mod_base = OTHER; note = 2'-O-methylguanosine-3'-phosphorothioate
  modified_base 10: mod_base = OTHER; note = 2'-O-methyladenosine-3'-phosphorothioate
  modified_base 11: mod_base = OTHER; note = 2'-O-methylguanosine-3'-phosphorothioate
  modified_base 12: mod_base = OTHER; note = 2'-O,4'-C-methylene 5-methyluridine-3'-phosphorothioate
  modified_base 13: mod_base = OTHER; note = 2'-O,4'-C-methylene 5-methyluridine-3'-phosphorothioate
  modified_base 14: mod_base = OTHER; note = 2'-O-methylcytidine-3'-phosphorothioate
  modified_base 15: mod_base = OTHER; note = 2'-O,4'-C-methylene 5-methylcytidine-3'-phosphorothioate
  modified_base 16: mod_base = OTHER; note = 2'-O-methyladenosine-3'-phosphorothioate
  modified_base 17: mod_base = OTHER; note = 2'-O,4'-C-methylene 5-methylcytidine-3'-phosphorothioate
  modified_base 18: mod_base = OTHER; note = 2'-O,4'-C-methylene 5-methyluridine-3'-phosphate
  modified_base 19: mod_base = OTHER; note = 2'-deoxyadenosine-3'-phosphate ((2S,4R)-1-[29-[[2-(acetylamino)-2-deoxy-beta-D-galactopyra nosyl]oxy]-14,14-bis[[3-[[3-[[5-[[2-(acetylamino)-2-deoxy-b eta-D-galactopyranosyl]oxy]-1-oxopentyl]amino]propyl]amino] -3-oxopropoxy]methyl]-1,12,19,25-tetraoxo-16-oxa-13,20,24-t riazanonacos-1-yl]-4-hydroxy-2-pyrrolidinyl)methyl ester
  misc_feature 1..18: note = RNA
  misc_feature 19: note = DNA
gtaccttagagttccacta

SEQ ID NO: 140 - DNA, 18 bp, synthetic construct
  source 1..18: mol_type = other DNA
  modified_base 1: mod_base = OTHER; note = 2'-O-methyluridine-3'-phosphorothioate
  modified_base 2: mod_base = OTHER; note = 2'-O-methyladenosine-3'-phosphorothioate
  modified_base 3: mod_base = OTHER; note = 2'-O-methylcytidine-3'-phosphorothioate
  modified_base 4: mod_base = OTHER; note = 2'-O-methylcytidine-3'-phosphorothioate
  modified_base 5: mod_base = OTHER; note = 2'-O-methyluridine-3'-phosphorothioate
  modified_base 6: mod_base = OTHER; note = 2'-O-methyluridine-3'-phosphorothioate
  modified_base 7: mod_base = OTHER; note = 2'-O-methyladenosine-3'-phosphorothioate
  modified_base 8: mod_base = OTHER; note = 2'-O-methylguanosine-3'-phosphorothioate
  modified_base 9: mod_base = OTHER; note = 2'-O-methyladenosine-3'-phosphorothioate
  modified_base 10: mod_base = OTHER; note = 2'-O-methylguanosine-3'-phosphorothioate
  modified_base 11: mod_base = OTHER; note = 2'-O,4'-C-methylene 5-methyluridine-3'-phosphorothioate
  modified_base 12: mod_base = OTHER; note = 2'-O,4'-C-methylene 5-methyluridine-3'-phosphorothioate
  modified_base 13: mod_base = OTHER; note = 2'-O-methylcytidine-3'-phosphorothioate
  modified_base 14: mod_base = OTHER; note = 2'-O,4'-C-methylene 5-methylcytidine-3'-phosphorothioate
  modified_base 15: mod_base = OTHER; note = 2'-O-methyladenosine-3'-phosphorothioate
  modified_base 16: mod_base = OTHER; note = 2'-O,4'-C-methylene 5-methylcytidine-3'-phosphorothioate
  modified_base 17: mod_base = OTHER; note = 2'-O,4'-C-methylene 5-methyluridine-3'-phosphate
  modified_base 18: mod_base = OTHER; note = 2'-deoxyadenosine-3'-phosphate ((2S,4R)-1-[29-[[2-(acetylamino)-2-deoxy-beta-D-galactopyra nosyl]oxy]-14,14-bis[[3-[[3-[[5-[[2-(acetylamino)-2-deoxy-b eta-D-galactopyranosyl]oxy]-1-oxopentyl]amino]propyl]amino] -3-oxopropoxy]methyl]-1,12,19,25-tetraoxo-16-oxa-13,20,24-t riazanonacos-1-yl]-4-hydroxy-2-pyrrolidinyl)methyl ester
  misc_feature 1..17: note = RNA
  misc_feature 18: note = DNA
taccttagagttccacta

SEQ ID NO: 141 - DNA, 17 bp, synthetic construct
  source 1..17: mol_type = other DNA
  modified_base 1: mod_base = OTHER; note = 2'-O-methyladenosine-3'-phosphorothioate
  modified_base 2: mod_base = OTHER; note = 2'-O-methylcytidine-3'-phosphorothioate
  modified_base 3: mod_base = OTHER; note = 2'-O-methylcytidine-3'-phosphorothioate
  modified_base 4: mod_base = OTHER; note = 2'-O-methyluridine-3'-phosphorothioate
  modified_base 5: mod_base = OTHER; note = 2'-O-methyluridine-3'-phosphorothioate
  modified_base 6: mod_base = OTHER; note = 2'-O-methyladenosine-3'-phosphorothioate
  modified_base 7: mod_base = OTHER; note = 2'-O-methylguanosine-3'-phosphorothioate
  modified_base 8: mod_base = OTHER; note = 2'-O-methyladenosine-3'-phosphorothioate
  modified_base 9: mod_base = OTHER; note = 2'-O-methylguanosine-3'-phosphorothioate
  modified_base 10: mod_base = OTHER; note = 2'-O,4'-C-methylene 5-methyluridine-3'-phosphorothioate
  modified_base 11: mod_base = OTHER; note = 2'-O,4'-C-methylene 5-methyluridine-3'-phosphorothioate
  modified_base 12: mod_base = OTHER; note = 2'-O-methylcytidine-3'-phosphorothioate
  modified_base 13: mod_base = OTHER; note = 2'-O,4'-C-methylene 5-methylcytidine-3'-phosphorothioate
  modified_base 14: mod_base = OTHER; note = 2'-O-methyladenosine-3'-phosphorothioate
  modified_base 15: mod_base = OTHER; note = 2'-O,4'-C-methylene 5-methylcytidine-3'-phosphorothioate
  modified_base 16: mod_base = OTHER; note = 2'-O,4'-C-methylene 5-methyluridine-3'-phosphate
  modified_base 17: mod_base = OTHER; note = 2'-deoxyadenosine-3'-phosphate ((2S,4R)-1-[29-[[2-(acetylamino)-2-deoxy-beta-D-galactopyra nosyl]oxy]-14,14-bis[[3-[[3-[[5-[[2-(acetylamino)-2-deoxy-b eta-D-galactopyranosyl]oxy]-1-oxopentyl]amino]propyl]amino] -3-oxopropoxy]methyl]-1,12,19,25-tetraoxo-16-oxa-13,20,24-t riazanonacos-1-yl]-4-hydroxy-2-pyrrolidinyl)methyl ester
  misc_feature 1..16: note = RNA
  misc_feature 17: note = DNA
accttagagttccacta

SEQ ID NO: 142 - DNA, 16 bp, synthetic construct
  source 1..16: mol_type = other DNA
  modified_base 1: mod_base = OTHER; note = 2'-O-methylcytidine-3'-phosphorothioate
  modified_base 2: mod_base = OTHER; note = 2'-O-methylcytidine-3'-phosphorothioate
  modified_base 3: mod_base = OTHER; note = 2'-O-methyluridine-3'-phosphorothioate
  modified_base 4: mod_base = OTHER; note = 2'-O-methyluridine-3'-phosphorothioate
  modified_base 5: mod_base = OTHER; note = 2'-O-methyladenosine-3'-phosphorothioate
  modified_base 6: mod_base = OTHER; note = 2'-O-methylguanosine-3'-phosphorothioate
  modified_base 7: mod_base = OTHER; note = 2'-O-methyladenosine-3'-phosphorothioate
  modified_base 8: mod_base = OTHER; note = 2'-O-methylguanosine-3'-phosphorothioate
  modified_base 9: mod_base = OTHER; note = 2'-O,4'-C-methylene 5-methyluridine-3'-phosphorothioate
  modified_base 10: mod_base = OTHER; note = 2'-O,4'-C-methylene 5-methyluridine-3'-phosphorothioate
  modified_base 11: mod_base = OTHER; note = 2'-O-methylcytidine-3'-phosphorothioate
  modified_base 12: mod_base = OTHER; note = 2'-O,4'-C-methylene 5-methylcytidine-3'-phosphorothioate
  modified_base 13: mod_base = OTHER; note = 2'-O-methyladenosine-3'-phosphorothioate
  modified_base 14: mod_base = OTHER; note = 2'-O,4'-C-methylene 5-methylcytidine-3'-phosphorothioate
  modified_base 15: mod_base = OTHER; note = 2'-O,4'-C-methylene 5-methyluridine-3'-phosphate
  modified_base 16: mod_base = OTHER; note = 2'-deoxyadenosine-3'-phosphate ((2S,4R)-1-[29-[[2-(acetylamino)-2-deoxy-beta-D-galactopyra nosyl]oxy]-14,14-bis[[3-[[3-[[5-[[2-(acetylamino)-2-deoxy-b eta-D-galactopyranosyl]oxy]-1-oxopentyl]amino]propyl]amino] -3-oxopropoxy]methyl]-1,12,19,25-tetraoxo-16-oxa-13,20,24-t riazanonacos-1-yl]-4-hydroxy-2-pyrrolidinyl)methyl ester
  misc_feature 1..15: note = RNA
  misc_feature 16: note = DNA
ccttagagttccacta

SEQ ID NO: 143 - DNA, 15 bp, synthetic construct
  source 1..15: mol_type = other DNA
  modified_base 1: mod_base = OTHER; note = 2'-O-methylcytidine-3'-phosphorothioate
  modified_base 2: mod_base = OTHER; note = 2'-O-methyluridine-3'-phosphorothioate
  modified_base 3: mod_base = OTHER; note = 2'-O-methyluridine-3'-phosphorothioate
  modified_base 4: mod_base = OTHER; note = 2'-O-methyladenosine-3'-phosphorothioate
  modified_base 5: mod_base = OTHER; note = 2'-O-methylguanosine-3'-phosphorothioate
  modified_base 6: mod_base = OTHER; note = 2'-O-methyladenosine-3'-phosphorothioate
  modified_base 7: mod_base = OTHER; note = 2'-O-methylguanosine-3'-phosphorothioate
  modified_base 8: mod_base = OTHER; note = 2'-O,4'-C-methylene 5-methyluridine-3'-phosphorothioate
  modified_base 9: mod_base = OTHER; note = 2'-O,4'-C-methylene 5-methyluridine-3'-phosphorothioate
  modified_base 10: mod_base = OTHER; note = 2'-O-methylcytidine-3'-phosphorothioate
  modified_base 11: mod_base = OTHER; note = 2'-O,4'-C-methylene 5-methylcytidine-3'-phosphorothioate
  modified_base 12: mod_base = OTHER; note = 2'-O-methyladenosine-3'-phosphorothioate
  modified_base 13: mod_base = OTHER; note = 2'-O,4'-C-methylene 5-methylcytidine-3'-phosphorothioate
  modified_base 14: mod_base = OTHER; note = 2'-O,4'-C-methylene 5-methyluridine-3'-phosphate
  modified_base 15: mod_base = OTHER; note = 2'-deoxyadenosine-3'-phosphate ((2S,4R)-1-[29-[[2-(acetylamino)-2-deoxy-beta-D-galactopyra nosyl]oxy]-14,14-bis[[3-[[3-[[5-[[2-(acetylamino)-2-deoxy-b eta-D-galactopyranosyl]oxy]-1-oxopentyl]amino]propyl]amino] -3-oxopropoxy]methyl]-1,12,19,25-tetraoxo-16-oxa-13,20,24-t riazanonacos-1-yl]-4-hydroxy-2-pyrrolidinyl)methyl ester
  misc_feature 1..14: note = RNA
  misc_feature 15: note = DNA
cttagagttccacta

SEQ ID NO: 144 - DNA, 14 bp, synthetic construct
  source 1..14: mol_type = other DNA
  modified_base 1: mod_base = OTHER; note = 2'-O-methyluridine-3'-phosphorothioate
  modified_base 2: mod_base = OTHER; note = 2'-O-methyluridine-3'-phosphorothioate
  modified_base 3: mod_base = OTHER; note = 2'-O-methyladenosine-3'-phosphorothioate
  modified_base 4: mod_base = OTHER; note = 2'-O-methylguanosine-3'-phosphorothioate
  modified_base 5: mod_base = OTHER; note = 2'-O-methyladenosine-3'-phosphorothioate
  modified_base 6: mod_base = OTHER; note = 2'-O-methylguanosine-3'-phosphorothioate
  modified_base 7: mod_base = OTHER; note = 2'-O,4'-C-methylene 5-methyluridine-3'-phosphorothioate
  modified_base 8: mod_base = OTHER; note = 2'-O,4'-C-methylene 5-methyluridine-3'-phosphorothioate
  modified_base 9: mod_base = OTHER; note = 2'-O-methylcytidine-3'-phosphorothioate
  modified_base 10: mod_base = OTHER; note = 2'-O,4'-C-methylene 5-methylcytidine-3'-phosphorothioate
  modified_base 11: mod_base = OTHER; note = 2'-O-methyladenosine-3'-phosphorothioate
  modified_base 12: mod_base = OTHER; note = 2'-O,4'-C-methylene 5-methylcytidine-3'-phosphorothioate
  modified_base 13: mod_base = OTHER; note = 2'-O,4'-C-methylene 5-methyluridine-3'-phosphate
  modified_base 14: mod_base = OTHER; note = 2'-deoxyadenosine-3'-phosphate ((2S,4R)-1-[29-[[2-(acetylamino)-2-deoxy-beta-D-galactopyra nosyl]oxy]-14,14-bis[[3-[[3-[[5-[[2-(acetylamino)-2-deoxy-b eta-D-galactopyranosyl]oxy]-1-oxopentyl]amino]propyl]amino] -3-oxopropoxy]methyl]-1,12,19,25-tetraoxo-16-oxa-13,20,24-t riazanonacos-1-yl]-4-hydroxy-2-pyrrolidinyl)methyl ester
  misc_feature 1..13: note = RNA
  misc_feature 14: note = DNA
ttagagttccacta

SEQ ID NO: 145 - DNA, 13 bp, synthetic construct
  source 1..13: mol_type = other DNA
  modified_base 1: mod_base = OTHER; note = 2'-O-methyluridine-3'-phosphorothioate
  modified_base 2: mod_base = OTHER; note = 2'-O-methyladenosine-3'-phosphorothioate
  modified_base 3: mod_base = OTHER; note = 2'-O-methylguanosine-3'-phosphorothioate
  modified_base 4: mod_base = OTHER; note = 2'-O-methyladenosine-3'-phosphorothioate
  modified_base 5: mod_base = OTHER; note = 2'-O-methylguanosine-3'-phosphorothioate
  modified_base 6: mod_base = OTHER; note = 2'-O,4'-C-methylene 5-methyluridine-3'-phosphorothioate
  modified_base 7: mod_base = OTHER; note = 2'-O,4'-C-methylene 5-methyluridine-3'-phosphorothioate
  modified_base 8: mod_base = OTHER; note = 2'-O-methylcytidine-3'-phosphorothioate
  modified_base 9: mod_base = OTHER; note = 2'-O,4'-C-methylene 5-methylcytidine-3'-phosphorothioate
  modified_base 10: mod_base = OTHER; note = 2'-O-methyladenosine-3'-phosphorothioate
  modified_base 11: mod_base = OTHER; note = 2'-O,4'-C-methylene 5-methylcytidine-3'-phosphorothioate
  modified_base 12: mod_base = OTHER; note = 2'-O,4'-C-methylene 5-methyluridine-3'-phosphate
  modified_base 13: mod_base = OTHER; note = 2'-deoxyadenosine-3'-phosphate ((2S,4R)-1-[29-[[2-(acetylamino)-2-deoxy-beta-D-galactopyra nosyl]oxy]-14,14-bis[[3-[[3-[[5-[[2-(acetylamino)-2-deoxy-b eta-D-galactopyranosyl]oxy]-1-oxopentyl]amino]propyl]amino] -3-oxopropoxy]methyl]-1,12,19,25-tetraoxo-16-oxa-13,20,24-t riazanonacos-1-yl]-4-hydroxy-2-pyrrolidinyl)methyl ester
  misc_feature 1..12: note = RNA
  misc_feature 13: note = DNA
tagagttccacta

SEQ ID NO: 146 - DNA, 12 bp, synthetic construct
  source 1..12: mol_type = other DNA
  modified_base 1: mod_base = OTHER; note = 2'-O-methyladenosine-3'-phosphorothioate
  modified_base 2: mod_base = OTHER; note = 2'-O-methylguanosine-3'-phosphorothioate
  modified_base 3: mod_base = OTHER; note = 2'-O-methyladenosine-3'-phosphorothioate
  modified_base 4: mod_base = OTHER; note = 2'-O-methylguanosine-3'-phosphorothioate
  modified_base 5: mod_base = OTHER; note = 2'-O,4'-C-methylene 5-methyluridine-3'-phosphorothioate
  modified_base 6: mod_base = OTHER; note = 2'-O,4'-C-methylene 5-methyluridine-3'-phosphorothioate
  modified_base 7: mod_base = OTHER; note = 2'-O-methylcytidine-3'-phosphorothioate
  modified_base 8: mod_base = OTHER; note = 2'-O,4'-C-methylene 5-methylcytidine-3'-phosphorothioate
  modified_base 9: mod_base = OTHER; note = 2'-O-methyladenosine-3'-phosphorothioate
  modified_base 10: mod_base = OTHER; note = 2'-O,4'-C-methylene 5-methylcytidine-3'-phosphorothioate
  modified_base 11: mod_base = OTHER; note = 2'-O,4'-C-methylene 5-methyluridine-3'-phosphate
  modified_base 12: mod_base = OTHER; note = 2'-deoxyadenosine-3'-phosphate ((2S,4R)-1-[29-[[2-(acetylamino)-2-deoxy-beta-D-galactopyra nosyl]oxy]-14,14-bis[[3-[[3-[[5-[[2-(acetylamino)-2-deoxy-b eta-D-galactopyranosyl]oxy]-1-oxopentyl]amino]propyl]amino] -3-oxopropoxy]methyl]-1,12,19,25-tetraoxo-16-oxa-13,20,24-t riazanonacos-1-yl]-4-hydroxy-2-pyrrolidinyl)methyl ester
  misc_feature 1..11: note = RNA
  misc_feature 12: note = DNA
agagttccacta

SEQ ID NO: 147 - DNA, 11 bp, synthetic construct
  source 1..11: mol_type = other DNA
  modified_base 1: mod_base = OTHER; note = 2'-O-methylguanosine-3'-phosphorothioate
  modified_base 2: mod_base = OTHER; note = 2'-O-methyladenosine-3'-phosphorothioate
  modified_base 3: mod_base = OTHER; note = 2'-O-methylguanosine-3'-phosphorothioate
  modified_base 4: mod_base = OTHER; note = 2'-O,4'-C-methylene 5-methyluridine-3'-phosphorothioate
  modified_base 5: mod_base = OTHER; note = 2'-O,4'-C-methylene 5-methyluridine-3'-phosphorothioate
  modified_base 6: mod_base = OTHER; note = 2'-O-methylcytidine-3'-phosphorothioate
  modified_base 7: mod_base = OTHER; note = 2'-O,4'-C-methylene 5-methylcytidine-3'-phosphorothioate
  modified_base 8: mod_base = OTHER; note = 2'-O-methyladenosine-3'-phosphorothioate
  modified_base 9: mod_base = OTHER; note = 2'-O,4'-C-methylene 5-methylcytidine-3'-phosphorothioate
  modified_base 10: mod_base = OTHER; note = 2'-O,4'-C-methylene 5-methyluridine-3'-phosphate
  modified_base 11: mod_base = OTHER; note = 2'-deoxyadenosine-3'-phosphate ((2S,4R)-1-[29-[[2-(acetylamino)-2-deoxy-beta-D-galactopyra nosyl]oxy]-14,14-bis[[3-[[3-[[5-[[2-(acetylamino)-2-deoxy-b eta-D-galactopyranosyl]oxy]-1-oxopentyl]amino]propyl]amino] -3-oxopropoxy]methyl]-1,12,19,25-tetraoxo-16-oxa-13,20,24-t riazanonacos-1-yl]-4-hydroxy-2-pyrrolidinyl)methyl ester
  misc_feature 1..10: note = RNA
  misc_feature 11: note = DNA
gagttccacta

SEQ ID NO: 148 - DNA, 10 bp, synthetic construct
  source 1..10: mol_type = other DNA
  modified_base 1: mod_base = OTHER; note = 2'-O-methyladenosine-3'-phosphorothioate
  modified_base 2: mod_base = OTHER; note = 2'-O-methylguanosine-3'-phosphorothioate
  modified_base 3: mod_base = OTHER; note = 2'-O,4'-C-methylene 5-methyluridine-3'-phosphorothioate
  modified_base 4: mod_base = OTHER; note = 2'-O,4'-C-methylene 5-methyluridine-3'-phosphorothioate
  modified_base 5: mod_base = OTHER; note = 2'-O-methylcytidine-3'-phosphorothioate
  modified_base 6: mod_base = OTHER; note = 2'-O,4'-C-methylene 5-methylcytidine-3'-phosphorothioate
  modified_base 7: mod_base = OTHER; note = 2'-O-methyladenosine-3'-phosphorothioate
  modified_base 8: mod_base = OTHER; note = 2'-O,4'-C-methylene 5-methylcytidine-3'-phosphorothioate
  modified_base 9: mod_base = OTHER; note = 2'-O,4'-C-methylene 5-methyluridine-3'-phosphate
  modified_base 10: mod_base = OTHER; note = 2'-deoxyadenosine-3'-phosphate ((2S,4R)-1-[29-[[2-(acetylamino)-2-deoxy-beta-D-galactopyra nosyl]oxy]-14,14-bis[[3-[[3-[[5-[[2-(acetylamino)-2-deoxy-b eta-D-galactopyranosyl]oxy]-1-oxopentyl]amino]propyl]amino] -3-oxopropoxy]methyl]-1,12,19,25-tetraoxo-16-oxa-13,20,24-t riazanonacos-1-yl]-4-hydroxy-2-pyrrolidinyl)methyl ester
  misc_feature 1..9: note = RNA
  misc_feature 10: note = DNA
agttccacta

SEQ ID NO: 149-150 - skipped (2 entries)

SEQ ID NO: 151 - DNA, 16 bp, synthetic construct
  source 1..16: mol_type = other DNA
  modified_base 1: mod_base = OTHER; note = 2'-O-methylcytidine-3'-phosphorothioate
  modified_base 2: mod_base = OTHER; note = 2'-O-methyluridine-3'-phosphorothioate
  modified_base 3: mod_base = OTHER; note = 2'-O-methyluridine-3'-phosphorothioate
  modified_base 4: mod_base = OTHER; note = 2'-O-methyladenosine-3'-phosphorothioate
  modified_base 5: mod_base = OTHER; note = 2'-O-methylguanosine-3'-phosphorothioate
  modified_base 6: mod_base = OTHER; note = 2'-O-methyladenosine-3'-phosphorothioate
  modified_base 7: mod_base = OTHER; note = 2'-O-methylguanosine-3'-phosphorothioate
  modified_base 8: mod_base = OTHER; note = 2'-O,4'-C-methylene 5-methyluridine-3'-phosphorothioate
  modified_base 9: mod_base = OTHER; note = 2'-O,4'-C-methylene 5-methyluridine-3'-phosphorothioate
  modified_base 10: mod_base = OTHER; note = 2'-O-methylcytidine-3'-phosphorothioate
  modified_base 11: mod_base = OTHER; note = 2'-O,4'-C-methylene 5-methylcytidine-3'-phosphorothioate
  modified_base 12: mod_base = OTHER; note = 2'-O-methyladenosine-3'-phosphorothioate
  modified_base 13: mod_base = OTHER; note = 2'-O,4'-C-methylene 5-methylcytidine-3'-phosphorothioate
  modified_base 14: mod_base = OTHER; note = 2'-O,4'-C-methylene 5-methyluridine-3'-phosphorothioate
  modified_base 15: mod_base = OTHER; note = 2'-O-methyladenosine-3'-phosphate
  modified_base 16: mod_base = OTHER; note = 2'-deoxyadenosine-3'-phosphate ((2S,4R)-1-[29-[[2-(acetylamino)-2-deoxy-beta-D-galactopyra nosyl]oxy]-14,14-bis[[3-[[3-[[5-[[2-(acetylamino)-2-deoxy-b eta-D-galactopyranosyl]oxy]-1-oxopentyl]amino]propyl]amino] -3-oxopropoxy]methyl]-1,12,19,25-tetraoxo-16-oxa-13,20,24-t riazanonacos-1-yl]-4-hydroxy-2-pyrrolidinyl)methyl ester
  misc_feature 1..15: note = RNA
  misc_feature 16: note = DNA
cttagagttccactaa

SEQ ID NO: 152 - DNA, 16 bp, synthetic construct
  source 1..16: mol_type = other DNA
  modified_base 1: mod_base = OTHER; note = 2'-O-methylcytidine-3'-phosphorothioate
  modified_base 2: mod_base = OTHER; note = 2'-O-methylcytidine-3'-phosphorothioate
  modified_base 3: mod_base = OTHER; note = 2'-O-methyluridine-3'-phosphorothioate
  modified_base 4: mod_base = OTHER; note = 2'-O-methyluridine-3'-phosphorothioate
  modified_base 5: mod_base = OTHER; note = 2'-O-methyladenosine-3'-phosphorothioate
  modified_base 6: mod_base = OTHER; note = 2'-O-methylguanosine-3'-phosphorothioate
  modified_base 7: mod_base = OTHER; note = 2'-O-methyladenosine-3'-phosphorothioate
  modified_base 8: mod_base = OTHER; note = 2'-O-methylguanosine-3'-phosphorothioate
  modified_base 9: mod_base = OTHER; note = 2'-O,4'-C-methylene 5-methyluridine-3'-phosphorothioate
  modified_base 10: mod_base = OTHER; note = 2'-O,4'-C-methylene 5-methyluridine-3'-phosphorothioate
  modified_base 11: mod_base = OTHER; note = 2'-O-methylcytidine-3'-phosphorothioate
  modified_base 12: mod_base = OTHER; note = 2'-O,4'-C-methylene 5-methylcytidine-3'-phosphorothioate
  modified_base 13: mod_base = OTHER; note = 2'-O-methyladenosine-3'-phosphorothioate
  modified_base 14: mod_base = OTHER; note = 2'-O,4'-C-methylene 5-methylcytidine-3'-phosphorothioate
  modified_base 15: mod_base = OTHER; note = 2'-O,4'-C-methylene 5-methyluridine-3'-phosphate
  modified_base 16: mod_base = OTHER; note = 2'-deoxyadenosine-3'-phosphate ((2S,4R)-1-[29-[[2-(acetylamino)-2-deoxy-beta-D-galactopyra nosyl]oxy]-14,14-bis[[3-[[3-[[5-[[2-(acetylamino)-2-deoxy-b eta-D-galactopyranosyl]oxy]-1-oxopentyl]amino]propyl]amino] -3-oxopropoxy]methyl]-1,12,19,25-tetraoxo-16-oxa-13,20,24-t riazanonacos-1-yl]-4-hydroxy-2-pyrrolidinyl)methyl ester
  misc_feature 1..15: note = RNA
  misc_feature 16: note = DNA
ccttagagttccacta

SEQ ID NO: 153 - DNA, 16 bp, synthetic construct
  source 1..16: mol_type = other DNA
  modified_base 1: mod_base = OTHER; note = 2'-O-methyladenosine-3'-phosphorothioate
  modified_base 2: mod_base = OTHER; note = 2'-O-methylcytidine-3'-phosphorothioate
  modified_base 3: mod_base = OTHER; note = 2'-O-methylcytidine-3'-phosphorothioate
  modified_base 4: mod_base = OTHER; note = 2'-O-methyluridine-3'-phosphorothioate
  modified_base 5: mod_base = OTHER; note = 2'-O,4'-C-methylene 5-methyluridine-3'-phosphorothioate
  modified_base 6: mod_base = OTHER; note = 2'-O-methyladenosine-3'-phosphorothioate
  modified_base 7: mod_base = OTHER; note = 2'-O-methylguanosine-3'-phosphorothioate
  modified_base 8: mod_base = OTHER; note = 2'-O-methyladenosine-3'-phosphorothioate
  modified_base 9: mod_base = OTHER; note = 2'-O-methylguanosine-3'-phosphorothioate
  modified_base 10: mod_base = OTHER; note = 2'-O,4'-C-methylene 5-methyluridine-3'-phosphorothioate
  modified_base 11: mod_base = OTHER; note = 2'-O,4'-C-methylene 5-methyluridine-3'-phosphorothioate
  modified_base 12: mod_base = OTHER; note = 2'-O-methylcytidine-3'-phosphorothioate
  modified_base 13: mod_base = OTHER; note = 2'-O,4'-C-methylene 5-methylcytidine-3'-phosphorothioate
  modified_base 14: mod_base = OTHER; note = 2'-O-methyladenosine-3'-phosphorothioate
  modified_base 15: mod_base = OTHER; note = 2'-O,4'-C-methylene 5-methylcytidine-3'-phosphate
  modified_base 16: mod_base = OTHER; note = 2'-deoxyadenosine-3'-phosphate ((2S,4R)-1-[29-[[2-(acetylamino)-2-deoxy-beta-D-galactopyra nosyl]oxy]-14,14-bis[[3-[[3-[[5-[[2-(acetylamino)-2-deoxy-b eta-D-galactopyranosyl]oxy]-1-oxopentyl]amino]propyl]amino] -3-oxopropoxy]methyl]-1,12,19,25-tetraoxo-16-oxa-13,20,24-t riazanonacos-1-yl]-4-hydroxy-2-pyrrolidinyl)methyl ester
  misc_feature 1..15: note = RNA
  misc_feature 16: note = DNA
accttagagttccaca

SEQ ID NO: 154 - DNA, 16 bp, synthetic construct
  source 1..16: mol_type = other DNA
  modified_base 1: mod_base = OTHER; note = 2'-O-methyluridine-3'-phosphorothioate
  modified_base 2: mod_base = OTHER; note = 2'-O-methyladenosine-3'-phosphorothioate
  modified_base 3: mod_base = OTHER; note = 2'-O-methylcytidine-3'-phosphorothioate
  modified_base 4: mod_base = OTHER; note = 2'-O,4'-C-methylene 5-methylcytidine-3'-phosphorothioate
  modified_base 5: mod_base = OTHER; note = 2'-O-methyluridine-3'-phosphorothioate
  modified_base 6: mod_base = OTHER; note = 2'-O,4'-C-methylene 5-methyluridine-3'-phosphorothioate
  modified_base 7: mod_base = OTHER; note = 2'-O-methyladenosine-3'-phosphorothioate
  modified_base 8: mod_base = OTHER; note = 2'-O-methylguanosine-3'-phosphorothioate
  modified_base 9: mod_base = OTHER; note = 2'-O-methyladenosine-3'-phosphorothioate
  modified_base 10: mod_base = OTHER; note = 2'-O-methylguanosine-3'-phosphorothioate
  modified_base 11: mod_base = OTHER; note = 2'-O,4'-C-methylene 5-methyluridine-3'-phosphorothioate
  modified_base 12: mod_base = OTHER; note = 2'-O,4'-C-methylene 5-methyluridine-3'-phosphorothioate
  modified_base 13: mod_base = OTHER; note = 2'-O-methylcytidine-3'-phosphorothioate
  modified_base 14: mod_base = OTHER; note = 2'-O,4'-C-methylene 5-methylcytidine-3'-phosphorothioate
  modified_base 15: mod_base = OTHER; note = 2'-O-methyladenosine-3'-phosphate
  modified_base 16: mod_base = OTHER; note = 2'-deoxyadenosine-3'-phosphate ((2S,4R)-1-[29-[[2-(acetylamino)-2-deoxy-beta-D-galactopyra nosyl]oxy]-14,14-bis[[3-[[3-[[5-[[2-(acetylamino)-2-deoxy-b eta-D-galactopyranosyl]oxy]-1-oxopentyl]amino]propyl]amino] -3-oxopropoxy]methyl]-1,12,19,25-tetraoxo-16-oxa-13,20,24-t riazanonacos-1-yl]-4-hydroxy-2-pyrrolidinyl)methyl ester
  misc_feature 1..15: note = RNA
  misc_feature 16: note = DNA
taccttagagttccaa

SEQ ID NO: 155 - DNA, 16 bp, synthetic construct
  source 1..16: mol_type = other DNA
  modified_base 1: mod_base = OTHER; note = 2'-O-methylguanosine-3'-phosphorothioate
  modified_base 2: mod_base = OTHER; note = 2'-O-methyluridine-3'-phosphorothioate
  modified_base 3: mod_base = OTHER; note = 2'-O-methyladenosine-3'-phosphorothioate
  modified_base 4: mod_base = OTHER; note = 2'-O-methylcytidine-3'-phosphorothioate
  modified_base 5: mod_base = OTHER; note = 2'-O,4'-C-methylene 5-methylcytidine-3'-phosphorothioate
  modified_base 6: mod_base = OTHER; note = 2'-O-methyluridine-3'-phosphorothioate
  modified_base 7: mod_base = OTHER; note = 2'-O,4'-C-methylene 5-methyluridine-3'-phosphorothioate
  modified_base 8: mod_base = OTHER; note = 2'-O-methyladenosine-3'-phosphorothioate
  modified_base 9: mod_base = OTHER; note = 2'-O-methylguanosine-3'-phosphorothioate
  modified_base 10: mod_base = OTHER; note = 2'-O-methyladenosine-3'-phosphorothioate
  modified_base 11: mod_base = OTHER; note = 2'-O-methylguanosine-3'-phosphorothioate
  modified_base 12: mod_base = OTHER; note = 2'-O,4'-C-methylene 5-methyluridine-3'-phosphorothioate
  modified_base 13: mod_base = OTHER; note = 2'-O,4'-C-methylene 5-methyluridine-3'-phosphorothioate
  modified_base 14: mod_base = OTHER; note = 2'-O-methylcytidine-3'-phosphorothioate
  modified_base 15: mod_base = OTHER; note = 2'-O,4'-C-methylene 5-methylcytidine-3'-phosphate
  modified_base 16: mod_base = OTHER; note = 2'-deoxyadenosine-3'-phosphate ((2S,4R)-1-[29-[[2-(acetylamino)-2-deoxy-beta-D-galactopyra nosyl]oxy]-14,14-bis[[3-[[3-[[5-[[2-(acetylamino)-2-deoxy-b eta-D-galactopyranosyl]oxy]-1-oxopentyl]amino]propyl]amino] -3-oxopropoxy]methyl]-1,12,19,25-tetraoxo-16-oxa-13,20,24-t riazanonacos-1-yl]-4-hydroxy-2-pyrrolidinyl)methyl ester
  misc_feature 1..15: note = RNA
  misc_feature 16: note = DNA
gtaccttagagttcca

SEQ ID NO: 156 - DNA, 16 bp, synthetic construct
  source 1..16: mol_type = other DNA
  modified_base 1: mod_base = OTHER; note = 2'-O-methyladenosine-3'-phosphorothioate
  modified_base 2: mod_base = OTHER; note = 2'-O-methylguanosine-3'-phosphorothioate
  modified_base 3: mod_base = OTHER; note = 2'-O,4'-C-methylene 5-methyluridine-3'-phosphorothioate
  modified_base 4: mod_base = OTHER; note = 2'-O-methyladenosine-3'-phosphorothioate
  modified_base 5: mod_base = OTHER; note = 2'-O-methylcytidine-3'-phosphorothioate
  modified_base 6: mod_base = OTHER; note = 2'-O,4'-C-methylene 5-methylcytidine-3'-phosphorothioate
  modified_base 7: mod_base = OTHER; note = 2'-O-methyluridine-3'-phosphorothioate
  modified_base 8: mod_base = OTHER; note = 2'-O,4'-C-methylene 5-methyluridine-3'-phosphorothioate
  modified_base 9: mod_base = OTHER; note = 2'-O-methyladenosine-3'-phosphorothioate
  modified_base 10: mod_base = OTHER; note = 2'-O-methylguanosine-3'-phosphorothioate
  modified_base 11: mod_base = OTHER; note = 2'-O-methyladenosine-3'-phosphorothioate
  modified_base 12: mod_base = OTHER; note = 2'-O-methylguanosine-3'-phosphorothioate
  modified_base 13: mod_base = OTHER; note = 2'-O,4'-C-methylene 5-methyluridine-3'-phosphorothioate
  modified_base 14: mod_base = OTHER; note = 2'-O,4'-C-methylene 5-methyluridine-3'-phosphorothioate
  modified_base 15: mod_base = OTHER; note = 2'-O-methylcytidine-3'-phosphate
  modified_base 16: mod_base = OTHER; note = 2'-deoxyadenosine-3'-phosphate ((2S,4R)-1-[29-[[2-(acetylamino)-2-deoxy-beta-D-galactopyra nosyl]oxy]-14,14-bis[[3-[[3-[[5-[[2-(acetylamino)-2-deoxy-b eta-D-galactopyranosyl]oxy]-1-oxopentyl]amino]propyl]amino] -3-oxopropoxy]methyl]-1,12,19,25-tetraoxo-16-oxa-13,20,24-t riazanonacos-1-yl]-4-hydroxy-2-pyrrolidinyl)methyl ester
  misc_feature 1..15: note = RNA
  misc_feature 16: note = DNA
agtaccttagagttca

SEQ ID NO: 157 - DNA, 16 bp, synthetic construct
  source 1..16: mol_type = other DNA
  modified_base 1: mod_base = OTHER; note = 2'-O-methylcytidine-3'-phosphorothioate
  modified_base 2: mod_base = OTHER; note = 2'-O-methyladenosine-3'-phosphorothioate
  modified_base 3: mod_base = OTHER; note = 2'-O-methylguanosine-3'-phosphorothioate
  modified_base 4: mod_base = OTHER; note = 2'-O,4'-C-methylene 5-methyluridine-3'-phosphorothioate
  modified_base 5: mod_base = OTHER; note = 2'-O-methyladenosine-3'-phosphorothioate
  modified_base 6: mod_base = OTHER; note = 2'-O-methylcytidine-3'-phosphorothioate
  modified_base 7: mod_base = OTHER; note = 2'-O,4'-C-methylene 5-methylcytidine-3'-phosphorothioate
  modified_base 8: mod_base = OTHER; note = 2'-O-methyluridine-3'-phosphorothioate
  modified_base 9: mod_base = OTHER; note = 2'-O,4'-C-methylene 5-methyluridine-3'-phosphorothioate
  modified_base 10: mod_base = OTHER; note = 2'-O-methyladenosine-3'-phosphorothioate
  modified_base 11: mod_base = OTHER; note = 2'-O-methylguanosine-3'-phosphorothioate
  modified_base 12: mod_base = OTHER; note = 2'-O-methyladenosine-3'-phosphorothioate
  modified_base 13: mod_base = OTHER; note = 2'-O-methylguanosine-3'-phosphorothioate
  modified_base 14: mod_base = OTHER; note = 2'-O,4'-C-methylene 5-methyluridine-3'-phosphorothioate
  modified_base 15: mod_base = OTHER; note = 2'-O,4'-C-methylene 5-methyluridine-3'-phosphate
  modified_base 16: mod_base = OTHER; note = 2'-deoxyadenosine-3'-phosphate ((2S,4R)-1-[29-[[2-(acetylamino)-2-deoxy-beta-D-galactopyra nosyl]oxy]-14,14-bis[[3-[[3-[[5-[[2-(acetylamino)-2-deoxy-b eta-D-galactopyranosyl]oxy]-1-oxopentyl]amino]propyl]amino] -3-oxopropoxy]methyl]-1,12,19,25-tetraoxo-16-oxa-13,20,24-t riazanonacos-1-yl]-4-hydroxy-2-pyrrolidinyl)methyl ester
  misc_feature 1..15: note = RNA
  misc_feature 16: note = DNA
cagtaccttagagtta

SEQ ID NO: 158 - DNA, 16 bp, synthetic construct
  source 1..16: mol_type = other DNA
  modified_base 1: mod_base = OTHER; note = 2'-O-methyluridine-3'-phosphorothioate
  modified_base 2: mod_base = OTHER; note = 2'-O,4'-C-methylene 5-methylcytidine-3'-phosphorothioate
  modified_base 3: mod_base = OTHER; note = 2'-O-methyladenosine-3'-phosphorothioate
  modified_base 4: mod_base = OTHER; note = 2'-O-methylguanosine-3'-phosphorothioate
  modified_base 5: mod_base = OTHER; note = 2'-O,4'-C-methylene 5-methyluridine-3'-phosphorothioate
  modified_base 6: mod_base = OTHER; note = 2'-O-methyladenosine-3'-phosphorothioate
  modified_base 7: mod_base = OTHER; note = 2'-O-methylcytidine-3'-phosphorothioate
  modified_base 8: mod_base = OTHER; note = 2'-O,4'-C-methylene 5-methylcytidine-3'-phosphorothioate
  modified_base 9: mod_base = OTHER; note = 2'-O-methyluridine-3'-phosphorothioate
  modified_base 10: mod_base = OTHER; note = 2'-O,4'-C-methylene 5-methyluridine-3'-phosphorothioate
  modified_base 11: mod_base = OTHER; note = 2'-O-methyladenosine-3'-phosphorothioate
  modified_base 12: mod_base = OTHER; note = 2'-O-methylguanosine-3'-phosphorothioate
  modified_base 13: mod_base = OTHER; note = 2'-O-methyladenosine-3'-phosphorothioate
  modified_base 14: mod_base = OTHER; note = 2'-O-methylguanosine-3'-phosphorothioate
  modified_base 15: mod_base = OTHER; note = 2'-O,4'-C-methylene 5-methyluridine-3'-phosphate
  modified_base 16: mod_base = OTHER; note = 2'-deoxyadenosine-3'-phosphate ((2S,4R)-1-[29-[[2-(acetylamino)-2-deoxy-beta-D-galactopyra nosyl]oxy]-14,14-bis[[3-[[3-[[5-[[2-(acetylamino)-2-deoxy-b eta-D-galactopyranosyl]oxy]-1-oxopentyl]amino]propyl]amino] -3-oxopropoxy]methyl]-1,12,19,25-tetraoxo-16-oxa-13,20,24-t riazanonacos-1-yl]-4-hydroxy-2-pyrrolidinyl)methyl ester
  misc_feature 1..15: note = RNA
  misc_feature 16: note = DNA
tcagtaccttagagta

SEQ ID NO: 159 - DNA, 16 bp, synthetic construct
  source 1..16: mol_type = other DNA
  modified_base 1: mod_base = OTHER; note = 2'-O,4'-C-methylene 5-methyluridine-3'-phosphorothioate
  modified_base 2: mod_base = OTHER; note = 2'-O-methyluridine-3'-phosphorothioate
  modified_base 3: mod_base = OTHER; note = 2'-O,4'-C-methylene 5-methylcytidine-3'-phosphorothioate
  modified_base 4: mod_base = OTHER; note = 2'-O-methyladenosine-3'-phosphorothioate
  modified_base 5: mod_base = OTHER; note = 2'-O-methylguanosine-3'-phosphorothioate
  modified_base 6: mod_base = OTHER; note = 2'-O,4'-C-methylene 5-methyluridine-3'-phosphorothioate
  modified_base 7: mod_base = OTHER; note = 2'-O-methyladenosine-3'-phosphorothioate
  modified_base 8: mod_base = OTHER; note = 2'-O-methylcytidine-3'-phosphorothioate
  modified_base 9: mod_base = OTHER; note = 2'-O,4'-C-methylene 5-methylcytidine-3'-phosphorothioate
  modified_base 10: mod_base = OTHER; note = 2'-O-methyluridine-3'-phosphorothioate
  modified_base 11: mod_base = OTHER; note = 2'-O,4'-C-methylene 5-methyluridine-3'-phosphorothioate
  modified_base 12: mod_base = OTHER; note = 2'-O-methyladenosine-3'-phosphorothioate
  modified_base 13: mod_base = OTHER; note = 2'-O-methylguanosine-3'-phosphorothioate
  modified_base 14: mod_base = OTHER; note = 2'-O-methyladenosine-3'-phosphorothioate
  modified_base 15: mod_base = OTHER; note = 2'-O-methylguanosine-3'-phosphate
  modified_base 16: mod_base = OTHER; note = 2'-deoxyadenosine-3'-phosphate ((2S,4R)-1-[29-[[2-(acetylamino)-2-deoxy-beta-D-galactopyra nosyl]oxy]-14,14-bis[[3-[[3-[[5-[[2-(acetylamino)-2-deoxy-b eta-D-galactopyranosyl]oxy]-1-oxopentyl]amino]propyl]amino] -3-oxopropoxy]methyl]-1,12,19,25-tetraoxo-16-oxa-13,20,24-t riazanonacos-1-yl]-4-hydroxy-2-pyrrolidinyl)methyl ester
  misc_feature 1..15: note = RNA
  misc_feature 16: note = DNA
ttcagtaccttagaga

SEQ ID NO: 160 - DNA, 16 bp, synthetic construct
  source 1..16: mol_type = other DNA
  modified_base 1: mod_base = OTHER; note = 2'-O-methylcytidine-3'-phosphorothioate
  modified_base 2: mod_base = OTHER; note = 2'-O-methylcytidine-3'-phosphorothioate
  modified_base 3: mod_base = OTHER; note = 2'-O-methyluridine-3'-phosphorothioate
  modified_base 4: mod_base = OTHER; note = 2'-O-methyluridine-3'-phosphorothioate
  modified_base 5: mod_base = OTHER; note = 2'-O-methyladenosine-3'-phosphorothioate
  modified_base 6: mod_base = OTHER; note = 2'-O-methylguanosine-3'-phosphorothioate
  modified_base 7: mod_base = OTHER; note = 2'-O-methyladenosine-3'-phosphorothioate
  modified_base 8: mod_base = OTHER; note = 2'-O-methylguanosine-3'-phosphorothioate
  modified_base 9: mod_base = OTHER; note = 2'-O,4'-C-methylene 5-methyluridine-3'-phosphorothioate
  modified_base 10: mod_base = OTHER; note = 2'-O,4'-C-methylene 5-methyluridine-3'-phosphorothioate
  modified_base 11: mod_base = OTHER; note = 2'-O-methylcytidine-3'-phosphorothioate
  modified_base 12: mod_base = OTHER; note = 2'-O,4'-C-methylene 5-methylcytidine-3'-phosphorothioate
  modified_base 13: mod_base = OTHER; note = 2'-O-methyladenosine-3'-phosphorothioate
  modified_base 14: mod_base = OTHER; note = 2'-O,4'-C-methylene 5-methylcytidine-3'-phosphorothioate
  modified_base 15: mod_base = OTHER; note = 2'-O,4'-C-methylene 5-methyluridine-3'-phosphate
  modified_base 16: mod_base = OTHER; note = 2'-deoxyadenosine-3'-phosphate ((2S,4R)-1-[29-[[2-(acetylamino)-2-deoxy-beta-D-galactopyra nosyl]oxy]-14,14-bis[[3-[[3-[[5-[[2-(acetylamino)-2-deoxy-b eta-D-galactopyranosyl]oxy]-1-oxopentyl]amino]propyl]amino] -3-oxopropoxy]methyl]-1,12,19,25-tetraoxo-16-oxa-13,20,24-t riazanonacos-1-yl]-4-hydroxy-2-pyrrolidinyl)methyl ester
  misc_feature 1..15: note = RNA
  misc_feature 16: note = DNA
ccttagagttccacta

SEQ ID NO: 161 - DNA, 16 bp, synthetic construct
  source 1..16: mol_type = other DNA
  modified_base 1: mod_base = OTHER; note = 2'-O-methylcytidine-3'-phosphorothioate
  modified_base 2: mod_base = OTHER; note = 2'-O-methylcytidine-3'-phosphorothioate
  modified_base 3: mod_base = OTHER; note = 2'-O-methyluridine-3'-phosphorothioate
  modified_base 4: mod_base = OTHER; note = 2'-O-methyluridine-3'-phosphorothioate
  modified_base 5: mod_base = OTHER; note = 2'-O-methyladenosine-3'-phosphorothioate
  modified_base 6: mod_base = OTHER; note = 2'-O-methylguanosine-3'-phosphorothioate
  modified_base 7: mod_base = OTHER; note = 2'-O-methyladenosine-3'-phosphorothioate
  modified_base 8: mod_base = OTHER; note = 2'-O-methylguanosine-3'-phosphorothioate
  modified_base 9: mod_base = OTHER; note = 2'-O,4'-C-methylene 5-methyluridine-3'-phosphorothioate
  modified_base 10: mod_base = OTHER; note = 2'-O,4'-C-methylene 5-methyluridine-3'-phosphorothioate
  modified_base 11: mod_base = OTHER; note = 2'-O-methylcytidine-3'-phosphorothioate
  modified_base 12: mod_base = OTHER; note = 2'-O,4'-C-methylene 5-methylcytidine-3'-phosphorothioate
  modified_base 13: mod_base = OTHER; note = 2'-O-methyladenosine-3'-phosphorothioate
  modified_base 14: mod_base = OTHER; note = 2'-O,4'-C-methylene 5-methylcytidine-3'-phosphorothioate
  modified_base 15: mod_base = OTHER; note = 2'-O,4'-C-methylene 5-methyluridine-3'-phosphorothioate
  modified_base 16: mod_base = OTHER; note = 2'-deoxyadenosine-3'-phosphate ((2S,4R)-1-[29-[[2-(acetylamino)-2-deoxy-beta-D-galactopyra nosyl]oxy]-14,14-bis[[3-[[3-[[5-[[2-(acetylamino)-2-deoxy-b eta-D-galactopyranosyl]oxy]-1-oxopentyl]amino]propyl]amino] -3-oxopropoxy]methyl]-1,12,19,25-tetraoxo-16-oxa-13,20,24-t riazanonacos-1-yl]-4-hydroxy-2-pyrrolidinyl)methyl ester
  misc_feature 1..15: note = RNA
  misc_feature 16: note = DNA
ccttagagttccacta

SEQ ID NO: 162 - RNA, 16 nt, synthetic construct
  source 1..16: mol_type = other RNA
  modified_base 1: mod_base = OTHER; note = 2'-O-methylcytidine-3'-phosphorothioate
  modified_base 2: mod_base = OTHER; note = 2'-O-methylcytidine-3'-phosphorothioate
  modified_base 3: mod_base = OTHER; note = 2'-O-methyluridine-3'-phosphorothioate
  modified_base 4: mod_base = OTHER; note = 2'-O-methyluridine-3'-phosphorothioate
  modified_base 5: mod_base = OTHER; note = 2'-O-methyladenosine-3'-phosphorothioate
  modified_base 6: mod_base = OTHER; note = 2'-O-methylguanosine-3'-phosphorothioate
  modified_base 7: mod_base = OTHER; note = 2'-O-methyladenosine-3'-phosphorothioate
  modified_base 8: mod_base = OTHER; note = 2'-O-methylguanosine-3'-phosphorothioate
  modified_base 9: mod_base = OTHER; note = 2'-O,4'-C-methylene 5-methyluridine-3'-phosphorothioate
  modified_base 10: mod_base = OTHER; note = 2'-O,4'-C-methylene 5-methyluridine-3'-phosphorothioate
  modified_base 11: mod_base = OTHER; note = 2'-O-methylcytidine-3'-phosphorothioate
  modified_base 12: mod_base = OTHER; note = 2'-O,4'-C-methylene 5-methylcytidine-3'-phosphorothioate
  modified_base 13: mod_base = OTHER; note = 2'-O-methyladenosine-3'-phosphorothioate
  modified_base 14: mod_base = OTHER; note = 2'-O,4'-C-methylene 5-methylcytidine-3'-phosphorothioate
  modified_base 15: mod_base = OTHER; note = 2'-O,4'-C-methylene 5-methyluridine-3'-phosphorothioate
  modified_base 16: mod_base = OTHER; note = 2'-O-methyladenosine-3'-phosphate ((2S,4R)-1-[29-[[2-(acetylamino)-2-deoxy-beta-D-galactopyra nosyl]oxy]-14,14-bis[[3-[[3-[[5-[[2-(acetylamino)-2-deoxy-b eta-D-galactopyranosyl]oxy]-1-oxopentyl]amino]propyl]amino] -3-oxopropoxy]methyl]-1,12,19,25-tetraoxo-16-oxa-13,20,24-t riazanonacos-1-yl]-4-hydroxy-2-pyrrolidinyl)methyl ester
ccttagagttccacta

SEQ ID NO: 163 - RNA, 16 nt, synthetic construct
  source 1..16: mol_type = other RNA
  modified_base 1: mod_base = OTHER; note = 2'-O-methylcytidine-3'-phosphorothioate
  modified_base 2: mod_base = OTHER; note = 2'-O-methylcytidine-3'-phosphorothioate
  modified_base 3: mod_base = OTHER; note = 2'-O-methyluridine-3'-phosphorothioate
  modified_base 4: mod_base = OTHER; note = 2'-O-methyluridine-3'-phosphorothioate
  modified_base 5: mod_base = OTHER; note = 2'-O-methyladenosine-3'-phosphorothioate
  modified_base 6: mod_base = OTHER; note = 2'-O-methylguanosine-3'-phosphorothioate
  modified_base 7: mod_base = OTHER; note = 2'-O-methyladenosine-3'-phosphorothioate
  modified_base 8: mod_base = OTHER; note = 2'-O-methylguanosine-3'-phosphorothioate
  modified_base 9: mod_base = OTHER; note = 2'-O,4'-C-methylene 5-methyluridine-3'-phosphorothioate
  modified_base 10: mod_base = OTHER; note = 2'-O,4'-C-methylene 5-methyluridine-3'-phosphorothioate
  modified_base 11: mod_base = OTHER; note = 2'-O-methylcytidine-3'-phosphorothioate
  modified_base 12: mod_base = OTHER; note = 2'-O,4'-C-methylene 5-methylcytidine-3'-phosphorothioate
  modified_base 13: mod_base = OTHER; note = 2'-O-methyladenosine-3'-phosphorothioate
  modified_base 14: mod_base = OTHER; note = 2'-O,4'-C-methylene 5-methylcytidine-3'-phosphorothioate
  modified_base 15: mod_base = OTHER; note = 2'-O,4'-C-methylene 5-methyluridine-3'-phosphorothioate
  modified_base 16: mod_base = OTHER; note = 2'-O-methyladenosine-3'-phosphorothioate ((2S,4R)-1-[29-[[2-(acetylamino)-2-deoxy-beta-D-galactopyra nosyl]oxy]-14,14-bis[[3-[[3-[[5-[[2-(acetylamino)-2-deoxy-b eta-D-galactopyranosyl]oxy]-1-oxopentyl]amino]propyl]amino] -3-oxopropoxy]methyl]-1,12,19,25-tetraoxo-16-oxa-13,20,24-t riazanonacos-1-yl]-4-hydroxy-2-pyrrolidinyl)methyl ester
ccttagagttccacta

SEQ ID NO: 164 - DNA, 16 bp, synthetic construct
  source 1..16: mol_type = other DNA
  modified_base 1: mod_base = OTHER; note = 2'-O-methylcytidine-3'-phosphorothioate
  modified_base 2: mod_base = OTHER; note = 2'-O-methylcytidine-3'-phosphorothioate
  modified_base 3: mod_base = OTHER; note = 2'-O-methyluridine-3'-phosphorothioate
  modified_base 4: mod_base = OTHER; note = 2'-O-methyluridine-3'-phosphorothioate
  modified_base 5: mod_base = OTHER; note = 2'-O-methyladenosine-3'-phosphorothioate
  modified_base 6: mod_base = OTHER; note = 2'-O-methylguanosine-3'-phosphorothioate
  modified_base 7: mod_base = OTHER; note = 2'-O-methyladenosine-3'-phosphorothioate
  modified_base 8: mod_base = OTHER; note = 2'-O-methylguanosine-3'-phosphorothioate
  modified_base 9: mod_base = OTHER; note = 2'-O,4'-C-methylene 5-methyluridine-3'-phosphorothioate
  modified_base 10: mod_base = OTHER; note = 2'-O,4'-C-methylene 5-methyluridine-3'-phosphorothioate
  modified_base 11: mod_base = OTHER; note = 2'-O-methylcytidine-3'-phosphorothioate
  modified_base 12: mod_base = OTHER; note = 2'-O,4'-C-methylene 5-methylcytidine-3'-phosphorothioate
  modified_base 13: mod_base = OTHER; note = 2'-O-methyladenosine-3'-phosphorothioate
  modified_base 14: mod_base = OTHER; note = 2'-O,4'-C-methylene 5-methylcytidine-3'-phosphorothioate
  modified_base 15: mod_base = OTHER; note = 2'-O,4'-C-methylene 5-methyluridine-3'-phosphate
  modified_base 16: mod_base = OTHER; note = 2'-deoxythymidine-3'-phosphate ((2S,4R)-1-[29-[[2-(acetylamino)-2-deoxy-beta-D-galactopyra nosyl]oxy]-14,14-bis[[3-[[3-[[5-[[2-(acetylamino)-2-deoxy-b eta-D-galactopyranosyl]oxy]-1-oxopentyl]amino]propyl]amino] -3-oxopropoxy]methyl]-1,12,19,25-tetraoxo-16-oxa-13,20,24-t riazanonacos-1-yl]-4-hydroxy-2-pyrrolidinyl)methyl ester
  misc_feature 1..15: note = RNA
  misc_feature 16: note = DNA
ccttagagttccactt

SEQ ID NO: 165 - DNA, 16 bp, synthetic construct
  source 1..16: mol_type = other DNA
  modified_base 1: mod_base = OTHER; note = 2'-O-methylcytidine-3'-phosphorothioate
  modified_base 2: mod_base = OTHER; note = 2'-O-methylcytidine-3'-phosphorothioate
  modified_base 3: mod_base = OTHER; note = 2'-O-methyluridine-3'-phosphorothioate
  modified_base 4: mod_base = OTHER; note = 2'-O-methyluridine-3'-phosphorothioate
  modified_base 5: mod_base = OTHER; note = 2'-O-methyladenosine-3'-phosphorothioate
  modified_base 6: mod_base = OTHER; note = 2'-O-methylguanosine-3'-phosphorothioate
  modified_base 7: mod_base = OTHER; note = 2'-O-methyladenosine-3'-phosphorothioate
  modified_base 8: mod_base = OTHER; note = 2'-O-methylguanosine-3'-phosphorothioate
  modified_base 9: mod_base = OTHER; note = 2'-O,4'-C-methylene 5-methyluridine-3'-phosphorothioate
  modified_base 10: mod_base = OTHER; note = 2'-O,4'-C-methylene 5-methyluridine-3'-phosphorothioate
  modified_base 11: mod_base = OTHER; note = 2'-O-methylcytidine-3'-phosphorothioate
  modified_base 12: mod_base = OTHER; note = 2'-O,4'-C-methylene 5-methylcytidine-3'-phosphorothioate
  modified_base 13: mod_base = OTHER; note = 2'-O-methyladenosine-3'-phosphorothioate
  modified_base 14: mod_base = OTHER; note = 2'-O,4'-C-methylene 5-methylcytidine-3'-phosphorothioate
  modified_base 15: mod_base = OTHER; note = 2'-O,4'-C-methylene 5-methyluridine-3'-phosphate
  modified_base 16: mod_base = OTHER; note = 2'-deoxyguanosine-3'-phosphate ((2S,4R)-1-[29-[[2-(acetylamino)-2-deoxy-beta-D-galactopyra nosyl]oxy]-14,14-bis[[3-[[3-[[5-[[2-(acetylamino)-2-deoxy-b eta-D-galactopyranosyl]oxy]-1-oxopentyl]amino]propyl]amino] -3-oxopropoxy]methyl]-1,12,19,25-tetraoxo-16-oxa-13,20,24-t riazanonacos-1-yl]-4-hydroxy-2-pyrrolidinyl)methyl ester
  misc_feature 1..15: note = RNA
  misc_feature 16: note = DNA
ccttagagttccactg

SEQ ID NO: 166 - DNA, 16 bp, synthetic construct
  source 1..16: mol_type = other DNA
  modified_base 1: mod_base = OTHER; note = 2'-O-methylcytidine-3'-phosphorothioate
  modified_base 2: mod_base = OTHER; note = 2'-O-methylcytidine-3'-phosphorothioate
  modified_base 3: mod_base = OTHER; note = 2'-O-methyluridine-3'-phosphorothioate
  modified_base 4: mod_base = OTHER; note = 2'-O-methyluridine-3'-phosphorothioate
  modified_base 5: mod_base = OTHER; note = 2'-O-methyladenosine-3'-phosphorothioate
  modified_base 6: mod_base = OTHER; note = 2'-O-methylguanosine-3'-phosphorothioate
  modified_base 7: mod_base = OTHER; note = 2'-O-methyladenosine-3'-phosphorothioate
  modified_base 8: mod_base = OTHER; note = 2'-O-methylguanosine-3'-phosphorothioate
  modified_base 9: mod_base = OTHER; note = 2'-O,4'-C-methylene 5-methyluridine-3'-phosphorothioate
  modified_base 10: mod_base = OTHER; note = 2'-O,4'-C-methylene 5-methyluridine-3'-phosphorothioate
  modified_base 11: mod_base = OTHER; note = 2'-O-methylcytidine-3'-phosphorothioate
  modified_base 12: mod_base = OTHER; note = 2'-O,4'-C-methylene 5-methylcytidine-3'-phosphorothioate
  modified_base 13: mod_base = OTHER; note = 2'-O-methyladenosine-3'-phosphorothioate
  modified_base 14: mod_base = OTHER; note = 2'-O,4'-C-methylene 5-methylcytidine-3'-phosphorothioate
  modified_base 15: mod_base = OTHER; note = 2'-O,4'-C-methylene 5-methyluridine-3'-phosphate
  modified_base 16: mod_base = OTHER; note = 2'-deoxycytidine-3'-phosphate ((2S,4R)-1-[29-[[2-(acetylamino)-2-deoxy-beta-D-galactopyra nosyl]oxy]-14,14-bis[[3-[[3-[[5-[[2-(acetylamino)-2-deoxy-b eta-D-galactopyranosyl]oxy]-1-oxopentyl]amino]propyl]amino] -3-oxopropoxy]methyl]-1,12,19,25-tetraoxo-16-oxa-13,20,24-t riazanonacos-1-yl]-4-hydroxy-2-pyrrolidinyl)methyl ester
  misc_feature 1..15: note = RNA
  misc_feature 16: note = DNA
ccttagagttccactc

SEQ ID NO: 167 - DNA, 16 bp, synthetic construct
  source 1..16: mol_type = other DNA
  modified_base 1: mod_base = OTHER; note = 2'-O-methylcytidine-3'-phosphorothioate
  modified_base 2: mod_base = OTHER; note = 2'-O-methylcytidine-3'-phosphorothioate
  modified_base 3: mod_base = OTHER; note = 2'-O-methyluridine-3'-phosphorothioate
  modified_base 4: mod_base = OTHER; note = 2'-O-methyluridine-3'-phosphorothioate
  modified_base 5: mod_base = OTHER; note = 2'-O-methyladenosine-3'-phosphorothioate
  modified_base 6: mod_base = OTHER; note = 2'-O-methylguanosine-3'-phosphorothioate
  modified_base 7: mod_base = OTHER; note = 2'-O-methyladenosine-3'-phosphorothioate
  modified_base 8: mod_base = OTHER; note = 2'-O-methylguanosine-3'-phosphorothioate
  modified_base 9: mod_base = OTHER; note = 2'-O,4'-C-methylene 5-methyluridine-3'-phosphorothioate
  modified_base 10: mod_base = OTHER; note = 2'-O,4'-C-methylene 5-methyluridine-3'-phosphorothioate
  modified_base 11: mod_base = OTHER; note = 2'-O-methylcytidine-3'-phosphorothioate
  modified_base 12: mod_base = OTHER; note = 2'-O,4'-C-methylene 5-methylcytidine-3'-phosphorothioate
  modified_base 13: mod_base = OTHER; note = 2'-O-methyladenosine-3'-phosphorothioate
  modified_base 14: mod_base = OTHER; note = 2'-O,4'-C-methylene 5-methylcytidine-3'-phosphorothioate
  modified_base 15: mod_base = OTHER; note = 2'-O,4'-C-methylene 5-methyluridine-3'-phosphate
  modified_base 16: mod_base = OTHER; note = 2'-deoxyadenosine-3'-phosphate ((2S,4R)-1-[29-[[2-(acetylamino)-2-deoxy-beta-D-galactopyra nosyl]oxy]-14,14-bis[[3-[[3-[[5-[[2-(acetylamino)-2-deoxy-b eta-D-galactopyranosyl]oxy]-1-oxopentyl]amino]propyl]amino] -3-oxopropoxy]methyl]-1,12,19,25-tetraoxo-16-oxa-13,20,24-t riazanonacos-1-yl]-4-hydroxy-2-pyrrolidinyl)methyl ester
  misc_feature 1..15: note = RNA
  misc_feature 16: note = DNA
ccttagagttccacta

SEQ ID NO: 168 - DNA, 16 bp, synthetic construct
  source 1..16: mol_type = other DNA
  modified_base 1: mod_base = OTHER; note = 2'-O,4'-C-methylene 5-methylcytidine-3'-phosphorothioate
  modified_base 2: mod_base = OTHER; note = 2'-O,4'-C-methylene 5-methylcytidine-3'-phosphorothioate
  modified_base 3: mod_base = OTHER; note = 2'-O-methyluridine-3'-phosphorothioate
  modified_base 4: mod_base = OTHER; note = 2'-O,4'-C-methylene 5-methyluridine-3'-phosphorothioate
  modified_base 5: mod_base = OTHER; note = 2'-O-methyladenosine-3'-phosphorothioate
  modified_base 6: mod_base = OTHER; note = 2'-O-methylguanosine-3'-phosphorothioate
  modified_base 7: mod_base = OTHER; note = 2'-O-methyladenosine-3'-phosphorothioate
  modified_base 8: mod_base = OTHER; note = 2'-O-methylguanosine-3'-phosphorothioate
  modified_base 9: mod_base = OTHER; note = 2'-O,4'-C-methylene 5-methyluridine-3'-phosphorothioate
  modified_base 10: mod_base = OTHER; note = 2'-O,4'-C-methylene 5-methyluridine-3'-phosphorothioate
  modified_base 11: mod_base = OTHER; note = 2'-O-methylcytidine-3'-phosphorothioate
  modified_base 12: mod_base = OTHER; note = 2'-O-methylcytidine-3'-phosphorothioate
  modified_base 13: mod_base = OTHER; note = 2'-O-methyladenosine-3'-phosphorothioate
  modified_base 14: mod_base = OTHER; note = 2'-O-methylcytidine-3'-phosphorothioate
  modified_base 15: mod_base = OTHER; note = 2'-O-methyluridine-3'-phosphate
  modified_base 16: mod_base = OTHER; note = 2'-deoxyadenosine-3'-phosphate ((2S,4R)-1-[29-[[2-(acetylamino)-2-deoxy-beta-D-galactopyra nosyl]oxy]-14,14-bis[[3-[[3-[[5-[[2-(acetylamino)-2-deoxy-b eta-D-galactopyranosyl]oxy]-1-oxopentyl]amino]propyl]amino] -3-oxopropoxy]methyl]-1,12,19,25-tetraoxo-16-oxa-13,20,24-t riazanonacos-1-yl]-4-hydroxy-2-pyrrolidinyl)methyl ester
  misc_feature 1..15: note = RNA
  misc_feature 16: note = DNA
ccttagagttccacta

SEQ ID NO: 169 - DNA, 16 bp, synthetic construct
  source 1..16: mol_type = other DNA
  modified_base 1: mod_base = OTHER; note = 2'-O-methylcytidine-3'-phosphorothioate
  modified_base 2: mod_base = OTHER; note = 2'-O-methylcytidine-3'-phosphorothioate
  modified_base 3: mod_base = OTHER; note = 2'-O,4'-C-methylene 5-methyluridine-3'-phosphorothioate
  modified_base 4: mod_base = OTHER; note = 2'-O,4'-C-methylene 5-methyluridine-3'-phosphorothioate
  modified_base 5: mod_base = OTHER; note = 2'-O-methyladenosine-3'-phosphorothioate
  modified_base 6: mod_base = OTHER; note = 2'-O-methylguanosine-3'-phosphorothioate
  modified_base 7: mod_base = OTHER; note = 2'-O-methyladenosine-3'-phosphorothioate
  modified_base 8: mod_base = OTHER; note = 2'-O-methylguanosine-3'-phosphorothioate
  modified_base 9: mod_base = OTHER; note = 2'-O,4'-C-methylene 5-methyluridine-3'-phosphorothioate
  modified_base 10: mod_base = OTHER; note = 2'-O,4'-C-methylene 5-methyluridine-3'-phosphorothioate
  modified_base 11: mod_base = OTHER; note = 2'-O-methylcytidine-3'-phosphorothioate
  modified_base 12: mod_base = OTHER; note = 2'-O,4'-C-methylene 5-methylcytidine-3'-phosphorothioate
  modified_base 13: mod_base = OTHER; note = 2'-O-methyladenosine-3'-phosphorothioate
  modified_base 14: mod_base = OTHER; note = 2'-O-methylcytidine-3'-phosphorothioate
  modified_base 15: mod_base = OTHER; note = 2'-O-methyluridine-3'-phosphate
  modified_base 16: mod_base = OTHER; note = 2'-deoxyadenosine-3'-phosphate ((2S,4R)-1-[29-[[2-(acetylamino)-2-deoxy-beta-D-galactopyra nosyl]oxy]-14,14-bis[[3-[[3-[[5-[[2-(acetylamino)-2-deoxy-b eta-D-galactopyranosyl]oxy]-1-oxopentyl]amino]propyl]amino] -3-oxopropoxy]methyl]-1,12,19,25-tetraoxo-16-oxa-13,20,24-t riazanonacos-1-yl]-4-hydroxy-2-pyrrolidinyl)methyl ester
  misc_feature 1..15: note = RNA
  misc_feature 16: note = DNA
ccttagagttccacta

SEQ ID NO: 170 - DNA, 16 bp, synthetic construct
  source 1..16: mol_type = other DNA
  modified_base 1: mod_base = OTHER; note = 2'-O,4'-C-methylene 5-methylcytidine-3'-phosphorothioate
  modified_base 2: mod_base = OTHER; note = 2'-O-methylcytidine-3'-phosphorothioate
  modified_base 3: mod_base = OTHER; note = 2'-O-methyluridine-3'-phosphorothioate
  modified_base 4: mod_base = OTHER; note = 2'-O,4'-C-methylene 5-methyluridine-3'-phosphorothioate
  modified_base 5: mod_base = OTHER; note = 2'-O-methyladenosine-3'-phosphorothioate
  modified_base 6: mod_base = OTHER; note = 2'-O-methylguanosine-3'-phosphorothioate
  modified_base 7: mod_base = OTHER; note = 2'-O-methyladenosine-3'-phosphorothioate
  modified_base 8: mod_base = OTHER; note = 2'-O-methylguanosine-3'-phosphorothioate
  modified_base 9: mod_base = OTHER; note = 2'-O,4'-C-methylene 5-methyluridine-3'-phosphorothioate
  modified_base 10: mod_base = OTHER; note = 2'-O-methyluridine-3'-phosphorothioate
  modified_base 11: mod_base = OTHER; note = 2'-O-methylcytidine-3'-phosphorothioate
  modified_base 12: mod_base = OTHER; note = 2'-O,4'-C-methylene 5-methylcytidine-3'-phosphorothioate
  modified_base 13: mod_base = OTHER; note = 2'-O-methyladenosine-3'-phosphorothioate
  modified_base 14: mod_base = OTHER; note = 2'-O-methylcytidine-3'-phosphorothioate
  modified_base 15: mod_base = OTHER; note = 2'-O,4'-C-methylene 5-methyluridine-3'-phosphate
  modified_base 16: mod_base = OTHER; note = 2'-deoxyadenosine-3'-phosphate ((2S,4R)-1-[29-[[2-(acetylamino)-2-deoxy-beta-D-galactopyra nosyl]oxy]-14,14-bis[[3-[[3-[[5-[[2-(acetylamino)-2-deoxy-b eta-D-galactopyranosyl]oxy]-1-oxopentyl]amino]propyl]amino] -3-oxopropoxy]methyl]-1,12,19,25-tetraoxo-16-oxa-13,20,24-t riazanonacos-1-yl]-4-hydroxy-2-pyrrolidinyl)methyl ester
  misc_feature 1..15: note = RNA
  misc_feature 16: note = DNA
ccttagagttccacta

SEQ ID NO: 171 - RNA, 15 nt, synthetic construct
  source 1..15: mol_type = other RNA
  modified_base 1: mod_base = OTHER; note = 2'-O-methylcytidine-3'-phosphorothioate
  modified_base 2: mod_base = OTHER; note = 2'-O-methylcytidine-3'-phosphorothioate
  modified_base 3: mod_base = OTHER; note = 2'-O-methyluridine-3'-phosphorothioate
  modified_base 4: mod_base = OTHER; note = 2'-O-methyluridine-3'-phosphorothioate
  modified_base 5: mod_base = OTHER; note = 2'-O-methyladenosine-3'-phosphorothioate
  modified_base 6: mod_base = OTHER; note = 2'-O-methylguanosine-3'-phosphorothioate
  modified_base 7: mod_base = OTHER; note = 2'-O-methyladenosine-3'-phosphorothioate
  modified_base 8: mod_base = OTHER; note = 2'-O-methylguanosine-3'-phosphorothioate
  modified_base 9: mod_base = OTHER; note = 2'-O,4'-C-methylene 5-methyluridine-3'-phosphorothioate
  modified_base 10: mod_base = OTHER; note = 2'-O,4'-C-methylene 5-methyluridine-3'-phosphorothioate
  modified_base 11: mod_base = OTHER; note = 2'-O-methylcytidine-3'-phosphorothioate
  modified_base 12: mod_base = OTHER; note = 2'-O,4'-C-methylene 5-methylcytidine-3'-phosphorothioate
  modified_base 13: mod_base = OTHER; note = 2'-O-methyladenosine-3'-phosphorothioate
  modified_base 14: mod_base = OTHER; note = 2'-O,4'-C-methylene 5-methylcytidine-3'-phosphorothioate
  modified_base 15: mod_base = OTHER; note = 2'-O,4'-C-methylene 5-methyluridine
ccttagagttccact

SEQ ID NO: 172 - RNA, 15 nt, synthetic construct
  source 1..15: mol_type = other RNA
  modified_base 1: mod_base = OTHER; note = 2'-O-methylcytidine-3'-phosphorothioate
  modified_base 2: mod_base = OTHER; note = 2'-O-methylcytidine-3'-phosphorothioate
  modified_base 3: mod_base = OTHER; note = 2'-O-methyluridine-3'-phosphate
  modified_base 4: mod_base = OTHER; note = 2'-O-methyluridine-3'-phosphate
  modified_base 5: mod_base = OTHER; note = 2'-O-methyladenosine-3'-phosphate
  modified_base 6: mod_base = OTHER; note = 2'-O-methylguanosine-3'-phosphate
  modified_base 7: mod_base = OTHER; note = 2'-O-methyladenosine-3'-phosphate
  modified_base 8: mod_base = OTHER; note = 2'-O-methylguanosine-3'-phosphate
  modified_base 9: mod_base = OTHER; note = 2'-O,4'-C-methylene 5-methyluridine-3'-phosphate
  modified_base 10: mod_base = OTHER; note = 2'-O,4'-C-methylene 5-methyluridine-3'-phosphate
  modified_base 11: mod_base = OTHER; note = 2'-O-methylcytidine-3'-phosphate
  modified_base 12: mod_base = OTHER; note = 2'-O,4'-C-methylene 5-methylcytidine-3'-phosphate
  modified_base 13: mod_base = OTHER; note = 2'-O-methyladenosine-3'-phosphate
  modified_base 14: mod_base = OTHER; note = 2'-O,4'-C-methylene 5-methylcytidine-3'-phosphorothioate
  modified_base 15: mod_base = OTHER; note = 2'-O,4'-C-methylene 5-methyluridine
ccttagagttccact

SEQ ID NO: 173 - RNA, 15 nt, synthetic construct
  source 1..15: mol_type = other RNA
  modified_base 1: mod_base = OTHER; note = 2'-O-methylcytidine-3'-phosphorothioate
  modified_base 2: mod_base = OTHER; note = 2'-O-methylcytidine-3'-phosphorothioate
  modified_base 3: mod_base = OTHER; note = 2'-O-methyluridine-3'-phosphorothioate
  modified_base 4: mod_base = OTHER; note = 2'-O-methyluridine-3'-phosphorothioate
  modified_base 5: mod_base = OTHER; note = 2'-O-methyladenosine-3'-phosphorothioate
  modified_base 6: mod_base = OTHER; note = 2'-O-methylguanosine-3'-phosphorothioate
  modified_base 7: mod_base = OTHER; note = 2'-O-methyladenosine-3'-phosphorothioate
  modified_base 8: mod_base = OTHER; note = 2'-O-methylguanosine-3'-phosphorothioate
  modified_base 9: mod_base = OTHER; note = 2'-O,4'-C-methylene 5-methyluridine-3'-phosphate
  modified_base 10: mod_base = OTHER; note = 2'-O,4'-C-methylene 5-methyluridine-3'-phosphate
  modified_base 11: mod_base = OTHER; note = 2'-O-methylcytidine-3'-phosphorothioate
  modified_base 12: mod_base = OTHER; note = 2'-O,4'-C-methylene 5-methylcytidine-3'-phosphate
  modified_base 13: mod_base = OTHER; note = 2'-O-methyladenosine-3'-phosphorothioate
  modified_base 14: mod_base = OTHER; note = 2'-O,4'-C-methylene 5-methylcytidine-3'-phosphorothioate
  modified_base 15: mod_base = OTHER; note = 2'-O,4'-C-methylene 5-methyluridine
ccttagagttccact

SEQ ID NO: 174 - DNA, 16 bp, synthetic construct
  source 1..16: mol_type = other DNA
  modified_base 1: mod_base = OTHER; note = 2'-O-methylcytidine-3'-phosphorothioate
  modified_base 2: mod_base = OTHER; note = 2'-O-methylcytidine-3'-phosphorothioate
  modified_base 3: mod_base = OTHER; note = 2'-O-methyluridine-3'-phosphorothioate
  modified_base 4: mod_base = OTHER; note = 2'-O-methyluridine-3'-phosphorothioate
  modified_base 5: mod_base = OTHER; note = 2'-O-methyladenosine-3'-phosphorothioate
  modified_base 6: mod_base = OTHER; note = 2'-O-methylguanosine-3'-phosphorothioate
  modified_base 7: mod_base = OTHER; note = 2'-O-methyladenosine-3'-phosphorothioate
  modified_base 8: mod_base = OTHER; note = 2'-O-methylguanosine-3'-phosphorothioate
  modified_base 9: mod_base = OTHER; note = 2'-O,4'-C-methylene 5-methyluridine-3'-phosphorothioate
  modified_base 10: mod_base = OTHER; note = 2'-O,4'-C-methylene 5-methyluridine-3'-phosphorothioate
  modified_base 11: mod_base = OTHER; note = 2'-O-methylcytidine-3'-phosphorothioate
  modified_base 12: mod_base = OTHER; note = 2'-O,4'-C-methylene 5-methylcytidine-3'-phosphorothioate
  modified_base 13: mod_base = OTHER; note = 2'-O-methyladenosine-3'-phosphorothioate
  modified_base 14: mod_base = OTHER; note = 2'-O,4'-C-methylene 5-methylcytidine-3'-phosphorothioate
  modified_base 15: mod_base = OTHER; note = 2'-O,4'-C-methylene 5-methyluridine-3'-phosphate
  modified_base 16: mod_base = OTHER; note = 2'-deoxyadenosine-3'-phosphate (N-(1-oxo-6-((3beta-cholest-5-en-3-yl)oxcarboxamido)hexyl)- 4-hydroxypyrrolidin-2-yl)methyl ester
  misc_feature 1..15: note = RNA
  misc_feature 16: note = DNA
ccttagagttccacta

SEQ ID NO: 175 - DNA, 16 bp, synthetic construct
  source 1..16: mol_type = other DNA
  modified_base 1: mod_base = OTHER; note = 2'-O-methylcytidine-3'-phosphorothioate
  modified_base 2: mod_base = OTHER; note = 2'-O-methylcytidine-3'-phosphorothioate
  modified_base 3: mod_base = OTHER; note = 2'-O-methyluridine-3'-phosphate
  modified_base 4: mod_base = OTHER; note = 2'-O-methyluridine-3'-phosphate
  modified_base 5: mod_base = OTHER; note = 2'-O-methyladenosine-3'-phosphate
  modified_base 6: mod_base = OTHER; note = 2'-O-methylguanosine-3'-phosphate
  modified_base 7: mod_base = OTHER; note = 2'-O-methyladenosine-3'-phosphate
  modified_base 8: mod_base = OTHER; note = 2'-O-methylguanosine-3'-phosphate
  modified_base 9: mod_base = OTHER; note = 2'-O,4'-C-methylene 5-methyluridine-3'-phosphate
  modified_base 10: mod_base = OTHER; note = 2'-O,4'-C-methylene 5-methyluridine-3'-phosphate
  modified_base 11: mod_base = OTHER; note = 2'-O-methylcytidine-3'-phosphate
  modified_base 12: mod_base = OTHER; note = 2'-O,4'-C-methylene 5-methylcytidine-3'-phosphate
  modified_base 13: mod_base = OTHER; note = 2'-O-methyladenosine-3'-phosphate
  modified_base 14: mod_base = OTHER; note = 2'-O,4'-C-methylene 5-methylcytidine-3'-phosphorothioate
  modified_base 15: mod_base = OTHER; note = 2'-O,4'-C-methylene 5-methyluridine-3'-phosphate
  modified_base 16: mod_base = OTHER; note = 2'-deoxyadenosine-3'-phosphate (N-(1-oxo-6-((3beta-cholest-5-en-3-yl)oxcarboxamido)hexyl)- 4-hydroxypyrrolidin-2-yl)methyl ester
  misc_feature 1..15: note = RNA
  misc_feature 16: note = DNA
ccttagagttccacta

SEQ ID NO: 176 - DNA, 16 bp, synthetic construct
  source 1..16: mol_type = other DNA
  modified_base 1: mod_base = OTHER; note = 2'-O-methylcytidine-3'-phosphorothioate
  modified_base 2: mod_base = OTHER; note = 2'-O-methylcytidine-3'-phosphorothioate
  modified_base 3: mod_base = OTHER; note = 2'-O-methyluridine-3'-phosphorothioate
  modified_base 4: mod_base = OTHER; note = 2'-O-methyluridine-3'-phosphorothioate
  modified_base 5: mod_base = OTHER; note = 2'-O-methyladenosine-3'-phosphorothioate
  modified_base 6: mod_base = OTHER; note = 2'-O-methylguanosine-3'-phosphorothioate
  modified_base 7: mod_base = OTHER; note = 2'-O-methyladenosine-3'-phosphorothioate
  modified_base 8: mod_base = OTHER; note = 2'-O-methylguanosine-3'-phosphorothioate
  modified_base 9: mod_base = OTHER; note = 2'-O,4'-C-methylene 5-methyluridine-3'-phosphate
  modified_base 10: mod_base = OTHER; note = 2'-O,4'-C-methylene 5-methyluridine-3'-phosphate
  modified_base 11: mod_base = OTHER; note = 2'-O-methylcytidine-3'-phosphorothioate
  modified_base 12: mod_base = OTHER; note = 2'-O,4'-C-methylene 5-methylcytidine-3'-phosphate
  modified_base 13: mod_base = OTHER; note = 2'-O-methyladenosine-3'-phosphorothioate
  modified_base 14: mod_base = OTHER; note = 2'-O,4'-C-methylene 5-methylcytidine-3'-phosphorothioate
  modified_base 15: mod_base = OTHER; note = 2'-O,4'-C-methylene 5-methyluridine-3'-phosphate
  modified_base 16: mod_base = OTHER; note = 2'-deoxyadenosine-3'-phosphate (N-(1-oxo-6-((3beta-cholest-5-en-3-yl)oxcarboxamido)hexyl)- 4-hydroxypyrrolidin-2-yl)methyl ester
  misc_feature 1..15: note = RNA
  misc_feature 16: note = DNA
ccttagagttccacta

SEQ ID NO: 177 - RNA, 15 nt, synthetic construct
  source 1..15: mol_type = other RNA
  modified_base 1: mod_base = OTHER; note = 2'-O-methylcytidine-3'-phosphorothioate 5'-phosphate 1-((5-([2-(acetylamino)-2-deoxy-beta-D-galactopyranosyl]oxy )pentan-1-oyl))-2S-(((1-((5-([2-(acetylamino)-2-deoxy-beta- D-galactopyranosyl]oxy)pentan-1-oyl))-2S-hydroxymethylpyrro lidin-4R-yloxy)(hydroxy)phosphoryloxy)methyl)-4R-pyrrolidin -4-yl
  modified_base 2: mod_base = OTHER; note = 2'-O-methylcytidine-3'-phosphorothioate
  modified_base 3: mod_base = OTHER; note = 2'-O-methyluridine-3'-phosphorothioate
  modified_base 4: mod_base = OTHER; note = 2'-O-methyluridine-3'-phosphorothioate
  modified_base 5: mod_base = OTHER; note = 2'-O-methyladenosine-3'-phosphorothioate
  modified_base 6: mod_base = OTHER; note = 2'-O-methylguanosine-3'-phosphorothioate
  modified_base 7: mod_base = OTHER; note = 2'-O-methyladenosine-3'-phosphorothioate
  modified_base 8: mod_base = OTHER; note = 2'-O-methylguanosine-3'-phosphorothioate
  modified_base 9: mod_base = OTHER; note = 2'-O,4'-C-methylene 5-methyluridine-3'-phosphorothioate
  modified_base 10: mod_base = OTHER; note = 2'-O,4'-C-methylene 5-methyluridine-3'-phosphorothioate
  modified_base 11: mod_base = OTHER; note = 2'-O-methylcytidine-3'-phosphorothioate
  modified_base 12: mod_base = OTHER; note = 2'-O,4'-C-methylene 5-methylcytidine-3'-phosphorothioate
  modified_base 13: mod_base = OTHER; note = 2'-O-methyladenosine-3'-phosphorothioate
  modified_base 14: mod_base = OTHER; note = 2'-O,4'-C-methylene 5-methylcytidine-3'-phosphorothioate
  modified_base 15: mod_base = OTHER; note = 2'-O,4'-C-methylene 5-methyluridine
ccttagagttccact

SEQ ID NO: 178 - DNA, 16 bp, synthetic construct
  source 1..16: mol_type = other DNA
  modified_base 1: mod_base = OTHER; note = 2'-O-methylcytidine-3'-phosphorothioate
  modified_base 2: mod_base = OTHER; note = 2'-O-methylcytidine-3'-phosphorothioate
  modified_base 3: mod_base = OTHER; note = 2'-O-methyluridine-3'-phosphate
  modified_base 4: mod_base = OTHER; note = 2'-O-methyluridine-3'-phosphate
  modified_base 5: mod_base = OTHER; note = 2'-O-methyladenosine-3'-phosphate
  modified_base 6: mod_base = OTHER; note = 2'-O-methylguanosine-3'-phosphate
  modified_base 7: mod_base = OTHER; note = 2'-O-methyladenosine-3'-phosphate
  modified_base 8: mod_base = OTHER; note = 2'-O-methylguanosine-3'-phosphate
  modified_base 9: mod_base = OTHER; note = 2'-O,4'-C-methylene 5-methyluridine-3'-phosphate
  modified_base 10: mod_base = OTHER; note = 2'-O,4'-C-methylene 5-methyluridine-3'-phosphate
  modified_base 11: mod_base = OTHER; note = 2'-O-methylcytidine-3'-phosphate
  modified_base 12: mod_base = OTHER; note = 2'-O,4'-C-methylene 5-methylcytidine-3'-phosphate
  modified_base 13: mod_base = OTHER; note = 2'-O-methyladenosine-3'-phosphate
  modified_base 14: mod_base = OTHER; note = 2'-O,4'-C-methylene 5-methylcytidine-3'-phosphorothioate
  modified_base 15: mod_base = OTHER; note = 2'-O,4'-C-methylene 5-methyluridine-3'-phosphate
  modified_base 16: mod_base = OTHER; note = 2'-deoxyadenosine-3'-phosphate ((2S,4R)-1-[29-[[2-(acetylamino)-2-deoxy-beta-D-galactopyra nosyl]oxy]-14,14-bis[[3-[[3-[[5-[[2-(acetylamino)-2-deoxy-b eta-D-galactopyranosyl]oxy]-1-oxopentyl]amino]propyl]amino] -3-oxopropoxy]methyl]-1,12,19,25-tetraoxo-16-oxa-13,20,24-t riazanonacos-1-yl]-4-hydroxy-2-pyrrolidinyl)methyl ester
  misc_feature 1..15: note = RNA
  misc_feature 16: note = DNA
ccttagagttccacta

SEQ ID NO: 179 - DNA, 16 bp, synthetic construct
  source 1..16: mol_type = other DNA
  modified_base 1: mod_base = OTHER; note = 2'-O-methylcytidine-3'-phosphorothioate
  modified_base 2: mod_base = OTHER; note = 2'-O-methylcytidine-3'-phosphorothioate
  modified_base 3: mod_base = OTHER; note = 2'-O-methyluridine-3'-phosphorothioate
  modified_base 4: mod_base = OTHER; note = 2'-O-methyluridine-3'-phosphorothioate
  modified_base 5: mod_base = OTHER; note = 2'-O-methyladenosine-3'-phosphorothioate
  modified_base 6: mod_base = OTHER; note = 2'-O-methylguanosine-3'-phosphorothioate
  modified_base 7: mod_base = OTHER; note = 2'-O-methyladenosine-3'-phosphorothioate
  modified_base 8: mod_base = OTHER; note = 2'-O-methylguanosine-3'-phosphorothioate
  modified_base 9: mod_base = OTHER; note = 2'-O,4'-C-methylene 5-methyluridine-3'-phosphate
  modified_base 10: mod_base = OTHER; note = 2'-O,4'-C-methylene 5-methyluridine-3'-phosphate
  modified_base 11: mod_base = OTHER; note = 2'-O-methylcytidine-3'-phosphorothioate
  modified_base 12: mod_base = OTHER; note = 2'-O,4'-C-methylene 5-methylcytidine-3'-phosphate
  modified_base 13: mod_base = OTHER; note = 2'-O-methyladenosine-3'-phosphorothioate
  modified_base 14: mod_base = OTHER; note = 2'-O,4'-C-methylene 5-methylcytidine-3'-phosphorothioate
  modified_base 15: mod_base = OTHER; note = 2'-O,4'-C-methylene 5-methyluridine-3'-phosphate
  modified_base 16: mod_base = OTHER; note = 2'-deoxyadenosine-3'-phosphate ((2S,4R)-1-[29-[[2-(acetylamino)-2-deoxy-beta-D-galactopyra nosyl]oxy]-14,14-bis[[3-[[3-[[5-[[2-(acetylamino)-2-deoxy-b eta-D-galactopyranosyl]oxy]-1-oxopentyl]amino]propyl]amino] -3-oxopropoxy]methyl]-1,12,19,25-tetraoxo-16-oxa-13,20,24-t riazanonacos-1-yl]-4-hydroxy-2-pyrrolidinyl)methyl ester
  misc_feature 1..15: note = RNA
  misc_feature 16: note = DNA
ccttagagttccacta

SEQ ID NO: 180 - DNA, 16 bp, synthetic construct
  source 1..16: mol_type = other DNA
  modified_base 1: mod_base = OTHER; note = 2'-O-methylcytidine-3'-phosphorothioate
  modified_base 2: mod_base = OTHER; note = 2'-O-methylcytidine-3'-phosphorothioate
  modified_base 3: mod_base = OTHER; note = 2'-O-methyluridine-3'-phosphorothioate
  modified_base 4: mod_base = OTHER; note = 2'-O-methyluridine-3'-phosphorothioate
  modified_base 5: mod_base = OTHER; note = 2'-O-methyladenosine-3'-phosphorothioate
  modified_base 6: mod_base = OTHER; note = 2'-O-methylguanosine-3'-phosphorothioate
  modified_base 7: mod_base = OTHER; note = 2'-O-methyladenosine-3'-phosphorothioate
  modified_base 8: mod_base = OTHER; note = 2'-O-methylguanosine-3'-phosphorothioate
  modified_base 9: mod_base = OTHER; note = 2'-O,4'-C-methylene 5-methyluridine-3'-phosphate
  modified_base 10: mod_base = OTHER; note = 2'-O,4'-C-methylene 5-methyluridine-3'-phosphate
  modified_base 11: mod_base = OTHER; note = 2'-O-methylcytidine-3'-phosphorothioate
  modified_base 12: mod_base = OTHER; note = 2'-O,4'-C-methylene 5-methylcytidine-3'-phosphate
  modified_base 13: mod_base = OTHER; note = 2'-O-methyladenosine-3'-phosphorothioate
  modified_base 14: mod_base = OTHER; note = 2'-O,4'-C-methylene 5-methylcytidine-3'-phosphate
  modified_base 15: mod_base = OTHER; note = 2'-O,4'-C-methylene 5-methyluridine-3'-phosphate
  modified_base 16: mod_base = OTHER; note = 2'-deoxyadenosine-3'-phosphate ((2S,4R)-1-[29-[[2-(acetylamino)-2-deoxy-beta-D-galactopyra nosyl]oxy]-14,14-bis[[3-[[3-[[5-[[2-(acetylamino)-2-deoxy-b eta-D-galactopyranosyl]oxy]-1-oxopentyl]amino]propyl]amino] -3-oxopropoxy]methyl]-1,12,19,25-tetraoxo-16-oxa-13,20,24-t riazanonacos-1-yl]-4-hydroxy-2-pyrrolidinyl)methyl ester
  misc_feature 1..15: note = RNA
  misc_feature 16: note = DNA
ccttagagttccacta

SEQ ID NO: 181 - DNA, 16 bp, synthetic construct
  source 1..16: mol_type = other DNA
  modified_base 1: mod_base = OTHER; note = 2'-O-methylcytidine-3'-phosphorothioate
  modified_base 2: mod_base = OTHER; note = 2'-O-methylcytidine-3'-phosphorothioate
  modified_base 3: mod_base = OTHER; note = 2'-O-methyluridine-3'-phosphorothioate
  modified_base 4: mod_base = OTHER; note = 2'-O-methyluridine-3'-phosphorothioate
  modified_base 5: mod_base = OTHER; note = 2'-O-methyladenosine-3'-phosphorothioate
  modified_base 6: mod_base = OTHER; note = 2'-O-methylguanosine-3'-phosphorothioate
  modified_base 7: mod_base = OTHER; note = 2'-O-methyladenosine-3'-phosphorothioate
  modified_base 8: mod_base = OTHER; note = 2'-O-methylguanosine-3'-phosphorothioate
  modified_base 9: mod_base = OTHER; note = 2'-O-methyluridine-3'-phosphorothioate
  modified_base 10: mod_base = OTHER; note = 2'-O-methyluridine-3'-phosphorothioate
  modified_base 11: mod_base = OTHER; note 1'-(9-(2-aminoethoxy)-1H-benzo[b]pyrimido[4,5-e][1,4]oxazin -2(3H)-on-3-yl)-1'-deoxy-2'-O-methyl-beta-ribofuranose 3'-phosphorothioate
  modified_base 12: mod_base = OTHER; note = 2'-O-methylcytidine-3'-phosphorothioate
  modified_base 13: mod_base = OTHER; note = 2'-O-methyladenosine-3'-phosphorothioate
  modified_base 14: mod_base = OTHER; note = 2'-O-methylcytidine-3'-phosphorothioate
  modified_base 15: mod_base = OTHER; note = 2'-O-methyluridine-3'-phosphate
  modified_base 16: mod_base = OTHER; note = 2'-deoxyadenosine-3'-phosphate ((2S,4R)-1-[29-[[2-(acetylamino)-2-deoxy-beta-D-galactopyra nosyl]oxy]-14,14-bis[[3-[[3-[[5-[[2-(acetylamino)-2-deoxy-b eta-D-galactopyranosyl]oxy]-1-oxopentyl]amino]propyl]amino] -3-oxopropoxy]methyl]-1,12,19,25-tetraoxo-16-oxa-13,20,24-t riazanonacos-1-yl]-4-hydroxy-2-pyrrolidinyl)methyl ester
  misc_feature 1..15: note = RNA
  misc_feature 16: note = DNA
ccttagagttncacta

SEQ ID NO: 182 - DNA, 16 bp, synthetic construct
  source 1..16: mol_type = other DNA
  modified_base 1: mod_base = OTHER; note = 2'-O-methylcytidine-3'-phosphorothioate
  modified_base 2: mod_base = OTHER; note = 2'-O-methylcytidine-3'-phosphorothioate
  modified_base 3: mod_base = OTHER; note = 2'-O-methyluridine-3'-phosphorothioate
  modified_base 4: mod_base = OTHER; note = 2'-O-methyluridine-3'-phosphorothioate
  modified_base 5: mod_base = OTHER; note = 2'-O-methyladenosine-3'-phosphorothioate
  modified_base 6: mod_base = OTHER; note = 2'-O-methylguanosine-3'-phosphorothioate
  modified_base 7: mod_base = OTHER; note = 2'-O-methyladenosine-3'-phosphorothioate
  modified_base 8: mod_base = OTHER; note = 2'-O-methylguanosine-3'-phosphorothioate
  modified_base 9: mod_base = OTHER; note = 2'-O-methyluridine-3'-phosphorothioate
  modified_base 10: mod_base = OTHER; note = 2'-O-methyluridine-3'-phosphorothioate
  modified_base 11: mod_base = OTHER; note = 2'-O-methylcytidine-3'-phosphorothioate
  modified_base 12: mod_base = OTHER; note 1'-(9-(2-aminoethoxy)-1H-benzo[b]pyrimido[4,5-e][1,4]oxazin -2(3H)-on-3-yl)-1'-deoxy-2'-O-methyl-beta-ribofuranose 3'-phosphorothioate
  modified_base 13: mod_base = OTHER; note = 2'-O-methyladenosine-3'-phosphorothioate
  modified_base 14: mod_base = OTHER; note = 2'-O-methylcytidine-3'-phosphorothioate
  modified_base 15: mod_base = OTHER; note = 2'-O-methyluridine-3'-phosphorothioate
  modified_base 16: mod_base = OTHER; note = 2'-deoxyadenosine-3'-phosphate ((2S,4R)-1-[29-[[2-(acetylamino)-2-deoxy-beta-D-galactopyra nosyl]oxy]-14,14-bis[[3-[[3-[[5-[[2-(acetylamino)-2-deoxy-b eta-D-galactopyranosyl]oxy]-1-oxopentyl]amino]propyl]amino] -3-oxopropoxy]methyl]-1,12,19,25-tetraoxo-16-oxa-13,20,24-t riazanonacos-1-yl]-4-hydroxy-2-pyrrolidinyl)methyl ester
  misc_feature 1..15: note = RNA
  misc_feature 16: note = DNA
ccttagagttcnacta

SEQ ID NO: 183 - DNA, 16 bp, synthetic construct
  source 1..16: mol_type = other DNA
  modified_base 1: mod_base = OTHER; note = 2'-O-methylcytidine-3'-phosphorothioate
  modified_base 2: mod_base = OTHER; note = 2'-O-methylcytidine-3'-phosphorothioate
  modified_base 3: mod_base = OTHER; note = 2'-O-methyluridine-3'-phosphorothioate
  modified_base 4: mod_base = OTHER; note = 2'-O-methyluridine-3'-phosphorothioate
  modified_base 5: mod_base = OTHER; note = 2'-O-methyladenosine-3'-phosphorothioate
  modified_base 6: mod_base = OTHER; note = 2'-O-methylguanosine-3'-phosphorothioate
  modified_base 7: mod_base = OTHER; note = 2'-O-methyladenosine-3'-phosphorothioate
  modified_base 8: mod_base = OTHER; note = 2'-O-methylguanosine-3'-phosphorothioate
  modified_base 9: mod_base = OTHER; note = 2'-O-methyluridine-3'-phosphorothioate
  modified_base 10: mod_base = OTHER; note = 2'-O-methyluridine-3'-phosphorothioate
  modified_base 11: mod_base = OTHER; note = 2'-O-methylcytidine-3'-phosphorothioate
  modified_base 12: mod_base = OTHER; note = 2'-O-methylcytidine-3'-phosphorothioate
  modified_base 13: mod_base = OTHER; note = 2'-O-methyladenosine-3'-phosphorothioate
  modified_base 14: mod_base = OTHER; note 1'-(9-(2-aminoethoxy)-1H-benzo[b]pyrimido[4,5-e][1,4]oxazin -2(3H)-on-3-yl)-1'-deoxy-2'-O-methyl-beta-ribofuranose 3'-phosphorothioate
  modified_base 15: mod_base = OTHER; note = 2'-O-methyluridine-3'-phosphate
  modified_base 16: mod_base = OTHER; note = 2'-deoxyadenosine-3'-phosphate ((2S,4R)-1-[29-[[2-(acetylamino)-2-deoxy-beta-D-galactopyra nosyl]oxy]-14,14-bis[[3-[[3-[[5-[[2-(acetylamino)-2-deoxy-b eta-D-galactopyranosyl]oxy]-1-oxopentyl]amino]propyl]amino] -3-oxopropoxy]methyl]-1,12,19,25-tetraoxo-16-oxa-13,20,24-t riazanonacos-1-yl]-4-hydroxy-2-pyrrolidinyl)methyl ester
  misc_feature 1..15: note = RNA
  misc_feature 16: note = DNA
ccttagagttccanta

SEQ ID NO: 184 - DNA, 16 bp, synthetic construct
  source 1..16: mol_type = other DNA
  modified_base 1: mod_base = OTHER; note = 2'-O-methylcytidine-3'-phosphorothioate
  modified_base 2: mod_base = OTHER; note 1'-(9-(2-aminoethoxy)-1H-benzo[b]pyrimido[4,5-e][1,4]oxazin -2(3H)-on-3-yl)-1'-deoxy-2'-O-methyl-beta-ribofuranose 3'-phosphorothioate
  modified_base 3: mod_base = OTHER; note = 2'-O-methyluridine-3'-phosphorothioate
  modified_base 4: mod_base = OTHER; note = 2'-O-methyluridine-3'-phosphorothioate
  modified_base 5: mod_base = OTHER; note = 2'-O-methyladenosine-3'-phosphorothioate
  modified_base 6: mod_base = OTHER; note = 2'-O-methylguanosine-3'-phosphorothioate
  modified_base 7: mod_base = OTHER; note = 2'-O-methyladenosine-3'-phosphorothioate
  modified_base 8: mod_base = OTHER; note = 2'-O-methylguanosine-3'-phosphorothioate
  modified_base 9: mod_base = OTHER; note = 2'-O-methyluridine-3'-phosphorothioate
  modified_base 10: mod_base = OTHER; note = 2'-O-methyluridine-3'-phosphorothioate
  modified_base 11: mod_base = OTHER; note = 2'-O-methylcytidine-3'-phosphorothioate
  modified_base 12: mod_base = OTHER; note = 2'-O-methylcytidine-3'-phosphorothioate
  modified_base 13: mod_base = OTHER; note = 2'-O-methyladenosine-3'-phosphorothioate
  modified_base 14: mod_base = OTHER; note = 2'-O-methylcytidine-3'-phosphorothioate
  modified_base 15: mod_base = OTHER; note = 2'-O-methyluridine-3'-phosphate
  modified_base 16: mod_base = OTHER; note = 2'-deoxyadenosine-3'-phosphate ((2S,4R)-1-[29-[[2-(acetylamino)-2-deoxy-beta-D-galactopyra nosyl]oxy]-14,14-bis[[3-[[3-[[5-[[2-(acetylamino)-2-deoxy-b eta-D-galactopyranosyl]oxy]-1-oxopentyl]amino]propyl]amino] -3-oxopropoxy]methyl]-1,12,19,25-tetraoxo-16-oxa-13,20,24-t riazanonacos-1-yl]-4-hydroxy-2-pyrrolidinyl)methyl ester
  misc_feature 1..15: note = RNA
  misc_feature 16: note = DNA
cnttagagttccacta

SEQ ID NO: 185 - DNA, 16 bp, synthetic construct
  source 1..16: mol_type = other DNA
  modified_base 1: mod_base = OTHER; note = 2'-O,4'-C-methylene 5-methylcytidine-3'-phosphorothioate
  modified_base 2: mod_base = OTHER; note = 2'-O-methylcytidine-3'-phosphorothioate
  modified_base 3: mod_base = OTHER; note = 2'-O-methyluridine-3'-phosphorothioate
  modified_base 4: mod_base = OTHER; note = 2'-O-methyluridine-3'-phosphorothioate
  modified_base 5: mod_base = OTHER; note = 2'-O-methyladenosine-3'-phosphorothioate
  modified_base 6: mod_base = OTHER; note = 2'-O-methylguanosine-3'-phosphorothioate
  modified_base 7: mod_base = OTHER; note = 2'-O-methyladenosine-3'-phosphorothioate
  modified_base 8: mod_base = OTHER; note = 2'-O-methylguanosine-3'-phosphorothioate
  modified_base 9: mod_base = OTHER; note = 2'-O-methyluridine-3'-phosphorothioate
  modified_base 10: mod_base = OTHER; note = 2'-O-methyluridine-3'-phosphorothioate
  modified_base 11: mod_base = OTHER; note = 2'-O-methylcytidine-3'-phosphorothioate
  modified_base 12: mod_base = OTHER; note = 2'-O-methylcytidine-3'-phosphorothioate
  modified_base 13: mod_base = OTHER; note = 2'-O-methyladenosine-3'-phosphorothioate
  modified_base 14: mod_base = OTHER; note = 2'-O-methylcytidine-3'-phosphorothioate
  modified_base 15: mod_base = OTHER; note = 2'-O-methyluridine-3'-phosphate
  modified_base 16: mod_base = OTHER; note = 2'-deoxyadenosine-3'-phosphate ((2S,4R)-1-[29-[[2-(acetylamino)-2-deoxy-beta-D-galactopyra nosyl]oxy]-14,14-bis[[3-[[3-[[5-[[2-(acetylamino)-2-deoxy-b eta-D-galactopyranosyl]oxy]-1-oxopentyl]amino]propyl]amino] -3-oxopropoxy]methyl]-1,12,19,25-tetraoxo-16-oxa-13,20,24-t riazanonacos-1-yl]-4-hydroxy-2-pyrrolidinyl)methyl ester
  misc_feature 1..15: note = RNA
  misc_feature 16: note = DNA
ccttagagttccacta

SEQ ID NO: 186 - DNA, 16 bp, synthetic construct
  source 1..16: mol_type = other DNA
  modified_base 1: mod_base = OTHER; note = 2'-O-methylcytidine-3'-phosphorothioate
  modified_base 2: mod_base = OTHER; note = 2'-O,4'-C-methylene 5-methylcytidine-3'-phosphorothioate
  modified_base 3: mod_base = OTHER; note = 2'-O-methyluridine-3'-phosphorothioate
  modified_base 4: mod_base = OTHER; note = 2'-O-methyluridine-3'-phosphorothioate
  modified_base 5: mod_base = OTHER; note = 2'-O-methyladenosine-3'-phosphorothioate
  modified_base 6: mod_base = OTHER; note = 2'-O-methylguanosine-3'-phosphorothioate
  modified_base 7: mod_base = OTHER; note = 2'-O-methyladenosine-3'-phosphorothioate
  modified_base 8: mod_base = OTHER; note = 2'-O-methylguanosine-3'-phosphorothioate
  modified_base 9: mod_base = OTHER; note = 2'-O-methyluridine-3'-phosphorothioate
  modified_base 10: mod_base = OTHER; note = 2'-O-methyluridine-3'-phosphorothioate
  modified_base 11: mod_base = OTHER; note = 2'-O-methylcytidine-3'-phosphorothioate
  modified_base 12: mod_base = OTHER; note = 2'-O-methylcytidine-3'-phosphorothioate
  modified_base 13: mod_base = OTHER; note = 2'-O-methyladenosine-3'-phosphorothioate
  modified_base 14: mod_base = OTHER; note = 2'-O-methylcytidine-3'-phosphorothioate
  modified_base 15: mod_base = OTHER; note = 2'-O-methyluridine-3'-phosphate
  modified_base 16: mod_base = OTHER; note = 2'-deoxyadenosine-3'-phosphate ((2S,4R)-1-[29-[[2-(acetylamino)-2-deoxy-beta-D-galactopyra nosyl]oxy]-14,14-bis[[3-[[3-[[5-[[2-(acetylamino)-2-deoxy-b eta-D-galactopyranosyl]oxy]-1-oxopentyl]amino]propyl]amino] -3-oxopropoxy]methyl]-1,12,19,25-tetraoxo-16-oxa-13,20,24-t riazanonacos-1-yl]-4-hydroxy-2-pyrrolidinyl)methyl ester
  misc_feature 1..15: note = RNA
  misc_feature 16: note = DNA
ccttagagttccacta

SEQ ID NO: 187 - DNA, 16 bp, synthetic construct
  source 1..16: mol_type = other DNA
  modified_base 1: mod_base = OTHER; note = 2'-O-methylcytidine-3'-phosphorothioate
  modified_base 2: mod_base = OTHER; note = 2'-O-methylcytidine-3'-phosphorothioate
  modified_base 3: mod_base = OTHER; note = 2'-O,4'-C-methylene 5-methyluridine-3'-phosphorothioate
  modified_base 4: mod_base = OTHER; note = 2'-O-methyluridine-3'-phosphorothioate
  modified_base 5: mod_base = OTHER; note = 2'-O-methyladenosine-3'-phosphorothioate
  modified_base 6: mod_base = OTHER; note = 2'-O-methylguanosine-3'-phosphorothioate
  modified_base 7: mod_base = OTHER; note = 2'-O-methyladenosine-3'-phosphorothioate
  modified_base 8: mod_base = OTHER; note = 2'-O-methylguanosine-3'-phosphorothioate
  modified_base 9: mod_base = OTHER; note = 2'-O-methyluridine-3'-phosphorothioate
  modified_base 10: mod_base = OTHER; note = 2'-O-methyluridine-3'-phosphorothioate
  modified_base 11: mod_base = OTHER; note = 2'-O-methylcytidine-3'-phosphorothioate
  modified_base 12: mod_base = OTHER; note = 2'-O-methylcytidine-3'-phosphorothioate
  modified_base 13: mod_base = OTHER; note = 2'-O-methyladenosine-3'-phosphorothioate
  modified_base 14: mod_base = OTHER; note = 2'-O-methylcytidine-3'-phosphorothioate
  modified_base 15: mod_base = OTHER; note = 2'-O-methyluridine-3'-phosphate
  modified_base 16: mod_base = OTHER; note = 2'-deoxyadenosine-3'-phosphate ((2S,4R)-1-[29-[[2-(acetylamino)-2-deoxy-beta-D-galactopyra nosyl]oxy]-14,14-bis[[3-[[3-[[5-[[2-(acetylamino)-2-deoxy-b eta-D-galactopyranosyl]oxy]-1-oxopentyl]amino]propyl]amino] -3-oxopropoxy]methyl]-1,12,19,25-tetraoxo-16-oxa-13,20,24-t riazanonacos-1-yl]-4-hydroxy-2-pyrrolidinyl)methyl ester
  misc_feature 1..15: note = RNA
  misc_feature 16: note = DNA
ccttagagttccacta

SEQ ID NO: 188 - DNA, 16 bp, synthetic construct
  source 1..16: mol_type = other DNA
  modified_base 1: mod_base = OTHER; note = 2'-O-methylcytidine-3'-phosphorothioate
  modified_base 2: mod_base = OTHER; note = 2'-O-methylcytidine-3'-phosphorothioate
  modified_base 3: mod_base = OTHER; note = 2'-O-methyluridine-3'-phosphorothioate
  modified_base 4: mod_base = OTHER; note = 2'-O,4'-C-methylene 5-methyluridine-3'-phosphorothioate
  modified_base 5: mod_base = OTHER; note = 2'-O-methyladenosine-3'-phosphorothioate
  modified_base 6: mod_base = OTHER; note = 2'-O-methylguanosine-3'-phosphorothioate
  modified_base 7: mod_base = OTHER; note = 2'-O-methyladenosine-3'-phosphorothioate
  modified_base 8: mod_base = OTHER; note = 2'-O-methylguanosine-3'-phosphorothioate
  modified_base 9: mod_base = OTHER; note = 2'-O-methyluridine-3'-phosphorothioate
  modified_base 10: mod_base = OTHER; note = 2'-O-methyluridine-3'-phosphorothioate
  modified_base 11: mod_base = OTHER; note = 2'-O-methylcytidine-3'-phosphorothioate
  modified_base 12: mod_base = OTHER; note = 2'-O-methylcytidine-3'-phosphorothioate
  modified_base 13: mod_base = OTHER; note = 2'-O-methyladenosine-3'-phosphorothioate
  modified_base 14: mod_base = OTHER; note = 2'-O-methylcytidine-3'-phosphorothioate
  modified_base 15: mod_base = OTHER; note = 2'-O-methyluridine-3'-phosphate
  modified_base 16: mod_base = OTHER; note = 2'-deoxyadenosine-3'-phosphate ((2S,4R)-1-[29-[[2-(acetylamino)-2-deoxy-beta-D-galactopyra nosyl]oxy]-14,14-bis[[3-[[3-[[5-[[2-(acetylamino)-2-deoxy-b eta-D-galactopyranosyl]oxy]-1-oxopentyl]amino]propyl]amino] -3-oxopropoxy]methyl]-1,12,19,25-tetraoxo-16-oxa-13,20,24-t riazanonacos-1-yl]-4-hydroxy-2-pyrrolidinyl)methyl ester
  misc_feature 1..15: note = RNA
  misc_feature 16: note = DNA
ccttagagttccacta

SEQ ID NO: 189 - DNA, 16 bp, synthetic construct
  source 1..16: mol_type = other DNA
  modified_base 1: mod_base = OTHER; note = 2'-O-methylcytidine-3'-phosphorothioate
  modified_base 2: mod_base = OTHER; note = 2'-O-methylcytidine-3'-phosphorothioate
  modified_base 3: mod_base = OTHER; note = 2'-O-methyluridine-3'-phosphorothioate
  modified_base 4: mod_base = OTHER; note = 2'-O-methyluridine-3'-phosphorothioate
  modified_base 5: mod_base = OTHER; note = 2'-O,4'-C-methylene adenosine-3'-phosphorothioate
  modified_base 6: mod_base = OTHER; note = 2'-O-methylguanosine-3'-phosphorothioate
  modified_base 7: mod_base = OTHER; note = 2'-O-methyladenosine-3'-phosphorothioate
  modified_base 8: mod_base = OTHER; note = 2'-O-methylguanosine-3'-phosphorothioate
  modified_base 9: mod_base = OTHER; note = 2'-O-methyluridine-3'-phosphorothioate
  modified_base 10: mod_base = OTHER; note = 2'-O-methyluridine-3'-phosphorothioate
  modified_base 11: mod_base = OTHER; note = 2'-O-methylcytidine-3'-phosphorothioate
  modified_base 12: mod_base = OTHER; note = 2'-O-methylcytidine-3'-phosphorothioate
  modified_base 13: mod_base = OTHER; note = 2'-O-methyladenosine-3'-phosphorothioate
  modified_base 14: mod_base = OTHER; note = 2'-O-methylcytidine-3'-phosphorothioate
  modified_base 15: mod_base = OTHER; note = 2'-O-methyluridine-3'-phosphate
  modified_base 16: mod_base = OTHER; note = 2'-deoxyadenosine-3'-phosphate ((2S,4R)-1-[29-[[2-(acetylamino)-2-deoxy-beta-D-galactopyra nosyl]oxy]-14,14-bis[[3-[[3-[[5-[[2-(acetylamino)-2-deoxy-b eta-D-galactopyranosyl]oxy]-1-oxopentyl]amino]propyl]amino] -3-oxopropoxy]methyl]-1,12,19,25-tetraoxo-16-oxa-13,20,24-t riazanonacos-1-yl]-4-hydroxy-2-pyrrolidinyl)methyl ester
  misc_feature 1..15: note = RNA
  misc_feature 16: note = DNA
ccttagagttccacta

SEQ ID NO: 190 - DNA, 16 bp, synthetic construct
  source 1..16: mol_type = other DNA
  modified_base 1: mod_base = OTHER; note = 2'-O-methylcytidine-3'-phosphorothioate
  modified_base 2: mod_base = OTHER; note = 2'-O-methylcytidine-3'-phosphorothioate
  modified_base 3: mod_base = OTHER; note = 2'-O-methyluridine-3'-phosphorothioate
  modified_base 4: mod_base = OTHER; note = 2'-O-methyluridine-3'-phosphorothioate
  modified_base 5: mod_base = OTHER; note = 2'-O-methyladenosine-3'-phosphorothioate
  modified_base 6: mod_base = OTHER; note = 2'-O,4'-C-methylene guanosine-3'-phosphorothioate
  modified_base 7: mod_base = OTHER; note = 2'-O-methyladenosine-3'-phosphorothioate
  modified_base 8: mod_base = OTHER; note = 2'-O-methylguanosine-3'-phosphorothioate
  modified_base 9: mod_base = OTHER; note = 2'-O-methyluridine-3'-phosphorothioate
  modified_base 10: mod_base = OTHER; note = 2'-O-methyluridine-3'-phosphorothioate
  modified_base 11: mod_base = OTHER; note = 2'-O-methylcytidine-3'-phosphorothioate
  modified_base 12: mod_base = OTHER; note = 2'-O-methylcytidine-3'-phosphorothioate
  modified_base 13: mod_base = OTHER; note = 2'-O-methyladenosine-3'-phosphorothioate
  modified_base 14: mod_base = OTHER; note = 2'-O-methylcytidine-3'-phosphorothioate
  modified_base 15: mod_base = OTHER; note = 2'-O-methyluridine-3'-phosphate
  modified_base 16: mod_base = OTHER; note = 2'-deoxyadenosine-3'-phosphate ((2S,4R)-1-[29-[[2-(acetylamino)-2-deoxy-beta-D-galactopyra nosyl]oxy]-14,14-bis[[3-[[3-[[5-[[2-(acetylamino)-2-deoxy-b eta-D-galactopyranosyl]oxy]-1-oxopentyl]amino]propyl]amino] -3-oxopropoxy]methyl]-1,12,19,25-tetraoxo-16-oxa-13,20,24-t riazanonacos-1-yl]-4-hydroxy-2-pyrrolidinyl)methyl ester
  misc_feature 1..15: note = RNA
  misc_feature 16: note = DNA
ccttagagttccacta

SEQ ID NO: 191 - DNA, 16 bp, synthetic construct
  source 1..16: mol_type = other DNA
  modified_base 1: mod_base = OTHER; note = 2'-O-methylcytidine-3'-phosphorothioate
  modified_base 2: mod_base = OTHER; note = 2'-O-methylcytidine-3'-phosphorothioate
  modified_base 3: mod_base = OTHER; note = 2'-O-methyluridine-3'-phosphorothioate
  modified_base 4: mod_base = OTHER; note = 2'-O-methyluridine-3'-phosphorothioate
  modified_base 5: mod_base = OTHER; note = 2'-O-methyladenosine-3'-phosphorothioate
  modified_base 6: mod_base = OTHER; note = 2'-O-methylguanosine-3'-phosphorothioate
  modified_base 7: mod_base = OTHER; note = 2'-O,4'-C-methylene adenosine-3'-phosphorothioate
  modified_base 8: mod_base = OTHER; note = 2'-O-methylguanosine-3'-phosphorothioate
  modified_base 9: mod_base = OTHER; note = 2'-O-methyluridine-3'-phosphorothioate
  modified_base 10: mod_base = OTHER; note = 2'-O-methyluridine-3'-phosphorothioate
  modified_base 11: mod_base = OTHER; note = 2'-O-methylcytidine-3'-phosphorothioate
  modified_base 12: mod_base = OTHER; note = 2'-O-methylcytidine-3'-phosphorothioate
  modified_base 13: mod_base = OTHER; note = 2'-O-methyladenosine-3'-phosphorothioate
  modified_base 14: mod_base = OTHER; note = 2'-O-methylcytidine-3'-phosphorothioate
  modified_base 15: mod_base = OTHER; note = 2'-O-methyluridine-3'-phosphate
  modified_base 16: mod_base = OTHER; note = 2'-deoxyadenosine-3'-phosphate ((2S,4R)-1-[29-[[2-(acetylamino)-2-deoxy-beta-D-galactopyra nosyl]oxy]-14,14-bis[[3-[[3-[[5-[[2-(acetylamino)-2-deoxy-b eta-D-galactopyranosyl]oxy]-1-oxopentyl]amino]propyl]amino] -3-oxopropoxy]methyl]-1,12,19,25-tetraoxo-16-oxa-13,20,24-t riazanonacos-1-yl]-4-hydroxy-2-pyrrolidinyl)methyl ester
  misc_feature 1..15: note = RNA
  misc_feature 16: note = DNA
ccttagagttccacta

SEQ ID NO: 192 - DNA, 16 bp, synthetic construct
  source 1..16: mol_type = other DNA
  modified_base 1: mod_base = OTHER; note = 2'-O-methylcytidine-3'-phosphorothioate
  modified_base 2: mod_base = OTHER; note = 2'-O-methylcytidine-3'-phosphorothioate
  modified_base 3: mod_base = OTHER; note = 2'-O-methyluridine-3'-phosphorothioate
  modified_base 4: mod_base = OTHER; note = 2'-O-methyluridine-3'-phosphorothioate
  modified_base 5: mod_base = OTHER; note = 2'-O-methyladenosine-3'-phosphorothioate
  modified_base 6: mod_base = OTHER; note = 2'-O-methylguanosine-3'-phosphorothioate
  modified_base 7: mod_base = OTHER; note = 2'-O-methyladenosine-3'-phosphorothioate
  modified_base 8: mod_base = OTHER; note = 2'-O,4'-C-methylene guanosine-3'-phosphorothioate
  modified_base 9: mod_base = OTHER; note = 2'-O-methyluridine-3'-phosphorothioate
  modified_base 10: mod_base = OTHER; note = 2'-O-methyluridine-3'-phosphorothioate
  modified_base 11: mod_base = OTHER; note = 2'-O-methylcytidine-3'-phosphorothioate
  modified_base 12: mod_base = OTHER; note = 2'-O-methylcytidine-3'-phosphorothioate
  modified_base 13: mod_base = OTHER; note = 2'-O-methyladenosine-3'-phosphorothioate
  modified_base 14: mod_base = OTHER; note = 2'-O-methylcytidine-3'-phosphorothioate
  modified_base 15: mod_base = OTHER; note = 2'-O-methyluridine-3'-phosphate
  modified_base 16: mod_base = OTHER; note = 2'-deoxyadenosine-3'-phosphate ((2S,4R)-1-[29-[[2-(acetylamino)-2-deoxy-beta-D-galactopyra nosyl]oxy]-14,14-bis[[3-[[3-[[5-[[2-(acetylamino)-2-deoxy-b eta-D-galactopyranosyl]oxy]-1-oxopentyl]amino]propyl]amino] -3-oxopropoxy]methyl]-1,12,19,25-tetraoxo-16-oxa-13,20,24-t riazanonacos-1-yl]-4-hydroxy-2-pyrrolidinyl)methyl ester
  misc_feature 1..15: note = RNA
  misc_feature 16: note = DNA
ccttagagttccacta

SEQ ID NO: 193 - DNA, 16 bp, synthetic construct
  source 1..16: mol_type = other DNA
  modified_base 1: mod_base = OTHER; note = 2'-O-methylcytidine-3'-phosphorothioate
  modified_base 2: mod_base = OTHER; note = 2'-O-methylcytidine-3'-phosphorothioate
  modified_base 3: mod_base = OTHER; note = 2'-O-methyluridine-3'-phosphorothioate
  modified_base 4: mod_base = OTHER; note = 2'-O-methyluridine-3'-phosphorothioate
  modified_base 5: mod_base = OTHER; note = 2'-O-methyladenosine-3'-phosphorothioate
  modified_base 6: mod_base = OTHER; note = 2'-O-methylguanosine-3'-phosphorothioate
  modified_base 7: mod_base = OTHER; note = 2'-O-methyladenosine-3'-phosphorothioate
  modified_base 8: mod_base = OTHER; note = 2'-O-methylguanosine-3'-phosphorothioate
  modified_base 9: mod_base = OTHER; note = 2'-O,4'-C-methylene 5-methyluridine-3'-phosphorothioate
  modified_base 10: mod_base = OTHER; note = 2'-O-methyluridine-3'-phosphorothioate
  modified_base 11: mod_base = OTHER; note = 2'-O-methylcytidine-3'-phosphorothioate
  modified_base 12: mod_base = OTHER; note = 2'-O-methylcytidine-3'-phosphorothioate
  modified_base 13: mod_base = OTHER; note = 2'-O-methyladenosine-3'-phosphorothioate
  modified_base 14: mod_base = OTHER; note = 2'-O-methylcytidine-3'-phosphorothioate
  modified_base 15: mod_base = OTHER; note = 2'-O-methyluridine-3'-phosphate
  modified_base 16: mod_base = OTHER; note = 2'-deoxyadenosine-3'-phosphate ((2S,4R)-1-[29-[[2-(acetylamino)-2-deoxy-beta-D-galactopyra nosyl]oxy]-14,14-bis[[3-[[3-[[5-[[2-(acetylamino)-2-deoxy-b eta-D-galactopyranosyl]oxy]-1-oxopentyl]amino]propyl]amino] -3-oxopropoxy]methyl]-1,12,19,25-tetraoxo-16-oxa-13,20,24-t riazanonacos-1-yl]-4-hydroxy-2-pyrrolidinyl)methyl ester
  misc_feature 1..15: note = RNA
  misc_feature 16: note = DNA
ccttagagttccacta

SEQ ID NO: 194 - DNA, 16 bp, synthetic construct
  source 1..16: mol_type = other DNA
  modified_base 1: mod_base = OTHER; note = 2'-O-methylcytidine-3'-phosphorothioate
  modified_base 2: mod_base = OTHER; note = 2'-O-methylcytidine-3'-phosphorothioate
  modified_base 3: mod_base = OTHER; note = 2'-O-methyluridine-3'-phosphorothioate
  modified_base 4: mod_base = OTHER; note = 2'-O-methyluridine-3'-phosphorothioate
  modified_base 5: mod_base = OTHER; note = 2'-O-methyladenosine-3'-phosphorothioate
  modified_base 6: mod_base = OTHER; note = 2'-O-methylguanosine-3'-phosphorothioate
  modified_base 7: mod_base = OTHER; note = 2'-O-methyladenosine-3'-phosphorothioate
  modified_base 8: mod_base = OTHER; note = 2'-O-methylguanosine-3'-phosphorothioate
  modified_base 9: mod_base = OTHER; note = 2'-O-methyluridine-3'-phosphorothioate
  modified_base 10: mod_base = OTHER; note = 2'-O,4'-C-methylene 5-methyluridine-3'-phosphorothioate
  modified_base 11: mod_base = OTHER; note = 2'-O-methylcytidine-3'-phosphorothioate
  modified_base 12: mod_base = OTHER; note = 2'-O-methylcytidine-3'-phosphorothioate
  modified_base 13: mod_base = OTHER; note = 2'-O-methyladenosine-3'-phosphorothioate
  modified_base 14: mod_base = OTHER; note = 2'-O-methylcytidine-3'-phosphorothioate
  modified_base 15: mod_base = OTHER; note = 2'-O-methyluridine-3'-phosphate
  modified_base 16: mod_base = OTHER; note = 2'-deoxyadenosine-3'-phosphate ((2S,4R)-1-[29-[[2-(acetylamino)-2-deoxy-beta-D-galactopyra nosyl]oxy]-14,14-bis[[3-[[3-[[5-[[2-(acetylamino)-2-deoxy-b eta-D-galactopyranosyl]oxy]-1-oxopentyl]amino]propyl]amino] -3-oxopropoxy]methyl]-1,12,19,25-tetraoxo-16-oxa-13,20,24-t riazanonacos-1-yl]-4-hydroxy-2-pyrrolidinyl)methyl ester
  misc_feature 1..15: note = RNA
  misc_feature 16: note = DNA
ccttagagttccacta

SEQ ID NO: 195 - DNA, 16 bp, synthetic construct
  source 1..16: mol_type = other DNA
  modified_base 1: mod_base = OTHER; note = 2'-O-methylcytidine-3'-phosphorothioate
  modified_base 2: mod_base = OTHER; note = 2'-O-methylcytidine-3'-phosphorothioate
  modified_base 3: mod_base = OTHER; note = 2'-O-methyluridine-3'-phosphorothioate
  modified_base 4: mod_base = OTHER; note = 2'-O-methyluridine-3'-phosphorothioate
  modified_base 5: mod_base = OTHER; note = 2'-O-methyladenosine-3'-phosphorothioate
  modified_base 6: mod_base = OTHER; note = 2'-O-methylguanosine-3'-phosphorothioate
  modified_base 7: mod_base = OTHER; note = 2'-O-methyladenosine-3'-phosphorothioate
  modified_base 8: mod_base = OTHER; note = 2'-O-methylguanosine-3'-phosphorothioate
  modified_base 9: mod_base = OTHER; note = 2'-O-methyluridine-3'-phosphorothioate
  modified_base 10: mod_base = OTHER; note = 2'-O-methyluridine-3'-phosphorothioate
  modified_base 11: mod_base = OTHER; note = 2'-O,4'-C-methylene 5-methylcytidine-3'-phosphorothioate
  modified_base 12: mod_base = OTHER; note = 2'-O-methylcytidine-3'-phosphorothioate
  modified_base 13: mod_base = OTHER; note = 2'-O-methyladenosine-3'-phosphorothioate
  modified_base 14: mod_base = OTHER; note = 2'-O-methylcytidine-3'-phosphorothioate
  modified_base 15: mod_base = OTHER; note = 2'-O-methyluridine-3'-phosphate
  modified_base 16: mod_base = OTHER; note = 2'-deoxyadenosine-3'-phosphate ((2S,4R)-1-[29-[[2-(acetylamino)-2-deoxy-beta-D-galactopyra nosyl]oxy]-14,14-bis[[3-[[3-[[5-[[2-(acetylamino)-2-deoxy-b eta-D-galactopyranosyl]oxy]-1-oxopentyl]amino]propyl]amino] -3-oxopropoxy]methyl]-1,12,19,25-tetraoxo-16-oxa-13,20,24-t riazanonacos-1-yl]-4-hydroxy-2-pyrrolidinyl)methyl ester
  misc_feature 1..15: note = RNA
  misc_feature 16: note = DNA
ccttagagttccacta

SEQ ID NO: 196 - DNA, 16 bp, synthetic construct
  source 1..16: mol_type = other DNA
  modified_base 1: mod_base = OTHER; note = 2'-O-methylcytidine-3'-phosphorothioate
  modified_base 2: mod_base = OTHER; note = 2'-O-methylcytidine-3'-phosphorothioate
  modified_base 3: mod_base = OTHER; note = 2'-O-methyluridine-3'-phosphorothioate
  modified_base 4: mod_base = OTHER; note = 2'-O-methyluridine-3'-phosphorothioate
  modified_base 5: mod_base = OTHER; note = 2'-O-methyladenosine-3'-phosphorothioate
  modified_base 6: mod_base = OTHER; note = 2'-O-methylguanosine-3'-phosphorothioate
  modified_base 7: mod_base = OTHER; note = 2'-O-methyladenosine-3'-phosphorothioate
  modified_base 8: mod_base = OTHER; note = 2'-O-methylguanosine-3'-phosphorothioate
  modified_base 9: mod_base = OTHER; note = 2'-O-methyluridine-3'-phosphorothioate
  modified_base 10: mod_base = OTHER; note = 2'-O-methyluridine-3'-phosphorothioate
  modified_base 11: mod_base = OTHER; note = 2'-O-methylcytidine-3'-phosphorothioate
  modified_base 12: mod_base = OTHER; note = 2'-O,4'-C-methylene 5-methylcytidine-3'-phosphorothioate
  modified_base 13: mod_base = OTHER; note = 2'-O-methyladenosine-3'-phosphorothioate
  modified_base 14: mod_base = OTHER; note = 2'-O-methylcytidine-3'-phosphorothioate
  modified_base 15: mod_base = OTHER; note = 2'-O-methyluridine-3'-phosphate
  modified_base 16: mod_base = OTHER; note = 2'-deoxyadenosine-3'-phosphate ((2S,4R)-1-[29-[[2-(acetylamino)-2-deoxy-beta-D-galactopyra nosyl]oxy]-14,14-bis[[3-[[3-[[5-[[2-(acetylamino)-2-deoxy-b eta-D-galactopyranosyl]oxy]-1-oxopentyl]amino]propyl]amino] -3-oxopropoxy]methyl]-1,12,19,25-tetraoxo-16-oxa-13,20,24-t riazanonacos-1-yl]-4-hydroxy-2-pyrrolidinyl)methyl ester
  misc_feature 1..15: note = RNA
  misc_feature 16: note = DNA
ccttagagttccacta

SEQ ID NO: 197 - DNA, 16 bp, synthetic construct
  source 1..16: mol_type = other DNA
  modified_base 1: mod_base = OTHER; note = 2'-O-methylcytidine-3'-phosphorothioate
  modified_base 2: mod_base = OTHER; note = 2'-O-methylcytidine-3'-phosphorothioate
  modified_base 3: mod_base = OTHER; note = 2'-O-methyluridine-3'-phosphorothioate
  modified_base 4: mod_base = OTHER; note = 2'-O-methyluridine-3'-phosphorothioate
  modified_base 5: mod_base = OTHER; note = 2'-O-methyladenosine-3'-phosphorothioate
  modified_base 6: mod_base = OTHER; note = 2'-O-methylguanosine-3'-phosphorothioate
  modified_base 7: mod_base = OTHER; note = 2'-O-methyladenosine-3'-phosphorothioate
  modified_base 8: mod_base = OTHER; note = 2'-O-methylguanosine-3'-phosphorothioate
  modified_base 9: mod_base = OTHER; note = 2'-O-methyluridine-3'-phosphorothioate
  modified_base 10: mod_base = OTHER; note = 2'-O-methyluridine-3'-phosphorothioate
  modified_base 11: mod_base = OTHER; note = 2'-O-methylcytidine-3'-phosphorothioate
  modified_base 12: mod_base = OTHER; note = 2'-O-methylcytidine-3'-phosphorothioate
  modified_base 13: mod_base = OTHER; note = 2'-O,4'-C-methylene adenosine-3'-phosphorothioate
  modified_base 14: mod_base = OTHER; note = 2'-O-methylcytidine-3'-phosphorothioate
  modified_base 15: mod_base = OTHER; note = 2'-O-methyluridine-3'-phosphate
  modified_base 16: mod_base = OTHER; note = 2'-deoxyadenosine-3'-phosphate ((2S,4R)-1-[29-[[2-(acetylamino)-2-deoxy-beta-D-galactopyra nosyl]oxy]-14,14-bis[[3-[[3-[[5-[[2-(acetylamino)-2-deoxy-b eta-D-galactopyranosyl]oxy]-1-oxopentyl]amino]propyl]amino] -3-oxopropoxy]methyl]-1,12,19,25-tetraoxo-16-oxa-13,20,24-t riazanonacos-1-yl]-4-hydroxy-2-pyrrolidinyl)methyl ester
  misc_feature 1..15: note = RNA
  misc_feature 16: note = DNA
ccttagagttccacta

SEQ ID NO: 198 - DNA, 16 bp, synthetic construct
  source 1..16: mol_type = other DNA
  modified_base 1: mod_base = OTHER; note = 2'-O-methylcytidine-3'-phosphorothioate
  modified_base 2: mod_base = OTHER; note = 2'-O-methylcytidine-3'-phosphorothioate
  modified_base 3: mod_base = OTHER; note = 2'-O-methyluridine-3'-phosphorothioate
  modified_base 4: mod_base = OTHER; note = 2'-O-methyluridine-3'-phosphorothioate
  modified_base 5: mod_base = OTHER; note = 2'-O-methyladenosine-3'-phosphorothioate
  modified_base 6: mod_base = OTHER; note = 2'-O-methylguanosine-3'-phosphorothioate
  modified_base 7: mod_base = OTHER; note = 2'-O-methyladenosine-3'-phosphorothioate
  modified_base 8: mod_base = OTHER; note = 2'-O-methylguanosine-3'-phosphorothioate
  modified_base 9: mod_base = OTHER; note = 2'-O-methyluridine-3'-phosphorothioate
  modified_base 10: mod_base = OTHER; note = 2'-O-methyluridine-3'-phosphorothioate
  modified_base 11: mod_base = OTHER; note = 2'-O-methylcytidine-3'-phosphorothioate
  modified_base 12: mod_base = OTHER; note = 2'-O-methylcytidine-3'-phosphorothioate
  modified_base 13: mod_base = OTHER; note = 2'-O-methyladenosine-3'-phosphorothioate
  modified_base 14: mod_base = OTHER; note = 2'-O,4'-C-methylene 5-methylcytidine-3'-phosphorothioate
  modified_base 15: mod_base = OTHER; note = 2'-O-methyluridine-3'-phosphorothioate
  modified_base 16: mod_base = OTHER; note = 2'-deoxyadenosine-3'-phosphate ((2S,4R)-1-[29-[[2-(acetylamino)-2-deoxy-beta-D-galactopyra nosyl]oxy]-14,14-bis[[3-[[3-[[5-[[2-(acetylamino)-2-deoxy-b eta-D-galactopyranosyl]oxy]-1-oxopentyl]amino]propyl]amino] -3-oxopropoxy]methyl]-1,12,19,25-tetraoxo-16-oxa-13,20,24-t riazanonacos-1-yl]-4-hydroxy-2-pyrrolidinyl)methyl ester
  misc_feature 1..15: note = RNA
  misc_feature 16: note = DNA
ccttagagttccacta

SEQ ID NO: 199 - DNA, 16 bp, synthetic construct
  source 1..16: mol_type = other DNA
  modified_base 1: mod_base = OTHER; note = 2'-O-methylcytidine-3'-phosphorothioate
  modified_base 2: mod_base = OTHER; note = 2'-O-methylcytidine-3'-phosphorothioate
  modified_base 3: mod_base = OTHER; note = 2'-O-methyluridine-3'-phosphorothioate
  modified_base 4: mod_base = OTHER; note = 2'-O-methyluridine-3'-phosphorothioate
  modified_base 5: mod_base = OTHER; note = 2'-O-methyladenosine-3'-phosphorothioate
  modified_base 6: mod_base = OTHER; note = 2'-O-methylguanosine-3'-phosphorothioate
  modified_base 7: mod_base = OTHER; note = 2'-O-methyladenosine-3'-phosphorothioate
  modified_base 8: mod_base = OTHER; note = 2'-O-methylguanosine-3'-phosphorothioate
  modified_base 9: mod_base = OTHER; note = 2'-O-methyluridine-3'-phosphorothioate
  modified_base 10: mod_base = OTHER; note = 2'-O-methyluridine-3'-phosphorothioate
  modified_base 11: mod_base = OTHER; note = 2'-O-methylcytidine-3'-phosphorothioate
  modified_base 12: mod_base = OTHER; note = 2'-O-methylcytidine-3'-phosphorothioate
  modified_base 13: mod_base = OTHER; note = 2'-O-methyladenosine-3'-phosphorothioate
  modified_base 14: mod_base = OTHER; note = 2'-O-methylcytidine-3'-phosphorothioate
  modified_base 15: mod_base = OTHER; note = 2'-O,4'-C-methylene 5-methyluridine-3'-phosphate
  modified_base 16: mod_base = OTHER; note = 2'-deoxyadenosine-3'-phosphate ((2S,4R)-1-[29-[[2-(acetylamino)-2-deoxy-beta-D-galactopyra nosyl]oxy]-14,14-bis[[3-[[3-[[5-[[2-(acetylamino)-2-deoxy-b eta-D-galactopyranosyl]oxy]-1-oxopentyl]amino]propyl]amino] -3-oxopropoxy]methyl]-1,12,19,25-tetraoxo-16-oxa-13,20,24-t riazanonacos-1-yl]-4-hydroxy-2-pyrrolidinyl)methyl ester
  misc_feature 1..15: note = RNA
  misc_feature 16: note = DNA
ccttagagttccacta

SEQ ID NO: 200 - DNA, 16 bp, synthetic construct
  source 1..16: mol_type = other DNA
  modified_base 1: mod_base = OTHER; note = 2'-O-methylcytidine-3'-phosphorothioate
  modified_base 2: mod_base = OTHER; note = 2'-O-methylcytidine-3'-phosphorothioate
  modified_base 3: mod_base = OTHER; note = 2'-O-methyluridine-3'-phosphorothioate
  modified_base 4: mod_base = OTHER; note = 2'-O-methyluridine-3'-phosphorothioate
  modified_base 5: mod_base = OTHER; note = 2'-O-methyladenosine-3'-phosphorothioate
  modified_base 6: mod_base = OTHER; note = 2'-O-methylguanosine-3'-phosphorothioate
  modified_base 7: mod_base = OTHER; note = 2'-O-methyladenosine-3'-phosphorothioate
  modified_base 8: mod_base = OTHER; note = 2'-O-methylguanosine-3'-phosphorothioate
  modified_base 9: mod_base = OTHER; note = 2'-O,4'-C-methylene 5-methyluridine-3'-phosphorothioate
  modified_base 10: mod_base = OTHER; note = 2'-O,4'-C-methylene 5-methylcytidine-3'-phosphorothioate
  modified_base 11: mod_base = OTHER; note = 2'-O-methylguanosine-3'-phosphorothioate
  modified_base 12: mod_base = OTHER; note = 2'-O,4'-C-methylene 5-methylcytidine-3'-phosphorothioate
  modified_base 13: mod_base = OTHER; note = 2'-O-methyluridine-3'-phosphorothioate
  modified_base 14: mod_base = OTHER; note = 2'-O,4'-C-methylene 5-methylcytidine-3'-phosphorothioate
  modified_base 15: mod_base = OTHER; note = 2'-O,4'-C-methylene 5-methylcytidine-3'-phosphate
  modified_base 16: mod_base = OTHER; note = 2'-deoxyadenosine-3'-phosphate ((2S,4R)-1-[29-[[2-(acetylamino)-2-deoxy-beta-D-galactopyra nosyl]oxy]-14,14-bis[[3-[[3-[[5-[[2-(acetylamino)-2-deoxy-b eta-D-galactopyranosyl]oxy]-1-oxopentyl]amino]propyl]amino] -3-oxopropoxy]methyl]-1,12,19,25-tetraoxo-16-oxa-13,20,24-t riazanonacos-1-yl]-4-hydroxy-2-pyrrolidinyl)methyl ester
  misc_feature 1..15: note = RNA
  misc_feature 16: note = DNA
ccttagagtcgctcca

SEQ ID NO: 201 - DNA, 16 bp, synthetic construct
  source 1..16: mol_type = other DNA
  modified_base 1: mod_base = OTHER; note = 2'-O-methylcytidine-3'-phosphorothioate
  modified_base 2: mod_base = OTHER; note = 2'-O-methylcytidine-3'-phosphorothioate
  modified_base 3: mod_base = OTHER; note = 2'-O-methyluridine-3'-phosphorothioate
  modified_base 4: mod_base = OTHER; note = 2'-O-methyluridine-3'-phosphorothioate
  modified_base 5: mod_base = OTHER; note = 2'-O-methyladenosine-3'-phosphorothioate
  modified_base 6: mod_base = OTHER; note = 2'-O-methylguanosine-3'-phosphorothioate
  modified_base 7: mod_base = OTHER; note = 2'-O-methyladenosine-3'-phosphorothioate
  modified_base 8: mod_base = OTHER; note = 2'-O-methylguanosine-3'-phosphorothioate
  modified_base 9: mod_base = OTHER; note = 2'-O,4'-C-methylene 5-methyluridine-3'-phosphorothioate
  modified_base 10: mod_base = OTHER; note = 2'-O,4'-C-methylene 5-methyluridine-3'-phosphorothioate
  modified_base 11: mod_base = OTHER; note = 2'-O-methylcytidine-3'-phosphorothioate
  modified_base 12: mod_base = OTHER; note = 2'-O,4'-C-methylene 5-methylcytidine-3'-phosphorothioate
  modified_base 13: mod_base = OTHER; note = 2'-O-methyluridine-3'-phosphorothioate
  modified_base 14: mod_base = OTHER; note = 2'-O,4'-C-methylene 5-methylcytidine-3'-phosphorothioate
  modified_base 15: mod_base = OTHER; note = 2'-O,4'-C-methylene 5-methylcytidine-3'-phosphate
  modified_base 16: mod_base = OTHER; note = 2'-deoxyadenosine-3'-phosphate ((2S,4R)-1-[29-[[2-(acetylamino)-2-deoxy-beta-D-galactopyra nosyl]oxy]-14,14-bis[[3-[[3-[[5-[[2-(acetylamino)-2-deoxy-b eta-D-galactopyranosyl]oxy]-1-oxopentyl]amino]propyl]amino] -3-oxopropoxy]methyl]-1,12,19,25-tetraoxo-16-oxa-13,20,24-t riazanonacos-1-yl]-4-hydroxy-2-pyrrolidinyl)methyl ester
  misc_feature 1..15: note = RNA
  misc_feature 16: note = DNA
ccttagagttcctcca

SEQ ID NO: 202 - DNA, 16 bp, synthetic construct
  source 1..16: mol_type = other DNA
  modified_base 1: mod_base = OTHER; note = 2'-O-methylcytidine-3'-phosphorothioate
  modified_base 2: mod_base = OTHER; note = 2'-O-methylcytidine-3'-phosphorothioate
  modified_base 3: mod_base = OTHER; note = 2'-O-methyluridine-3'-phosphorothioate
  modified_base 4: mod_base = OTHER; note = 2'-O-methyluridine-3'-phosphorothioate
  modified_base 5: mod_base = OTHER; note = 2'-O-methyladenosine-3'-phosphorothioate
  modified_base 6: mod_base = OTHER; note = 2'-O-methylguanosine-3'-phosphorothioate
  modified_base 7: mod_base = OTHER; note = 2'-O-methyladenosine-3'-phosphorothioate
  modified_base 8: mod_base = OTHER; note = 2'-O-methylguanosine-3'-phosphorothioate
  modified_base 9: mod_base = OTHER; note = 2'-O,4'-C-methylene 5-methyluridine-3'-phosphorothioate
  modified_base 10: mod_base = OTHER; note = 2'-O,4'-C-methylene 5-methyluridine-3'-phosphorothioate
  modified_base 11: mod_base = OTHER; note = 2'-O-methylcytidine-3'-phosphorothioate
  modified_base 12: mod_base = OTHER; note = 2'-O,4'-C-methylene 5-methylcytidine-3'-phosphorothioate
  modified_base 13: mod_base = OTHER; note = 2'-O-methyladenosine-3'-phosphorothioate
  modified_base 14: mod_base = OTHER; note = 2'-O,4'-C-methylene 5-methylcytidine-3'-phosphorothioate
  modified_base 15: mod_base = OTHER; note = 2'-O,4'-C-methylene 5-methylcytidine-3'-phosphate
  modified_base 16: mod_base = OTHER; note = 2'-deoxyadenosine-3'-phosphate ((2S,4R)-1-[29-[[2-(acetylamino)-2-deoxy-beta-D-galactopyra nosyl]oxy]-14,14-bis[[3-[[3-[[5-[[2-(acetylamino)-2-deoxy-b eta-D-galactopyranosyl]oxy]-1-oxopentyl]amino]propyl]amino] -3-oxopropoxy]methyl]-1,12,19,25-tetraoxo-16-oxa-13,20,24-t riazanonacos-1-yl]-4-hydroxy-2-pyrrolidinyl)methyl ester
  misc_feature 1..15: note = RNA
  misc_feature 16: note = DNA
ccttagagttccacca

SEQ ID NO: 203 - DNA, 16 bp, synthetic construct
  source 1..16: mol_type = other DNA
  modified_base 1: mod_base = OTHER; note = 2'-O-methylcytidine-3'-phosphorothioate
  modified_base 2: mod_base = OTHER; note = 2'-O-methylcytidine-3'-phosphorothioate
  modified_base 3: mod_base = OTHER; note = 2'-O-methyluridine-3'-phosphorothioate
  modified_base 4: mod_base = OTHER; note = 2'-O-methyluridine-3'-phosphorothioate
  modified_base 5: mod_base = OTHER; note = 2'-O-methyladenosine-3'-phosphorothioate
  modified_base 6: mod_base = OTHER; note = 2'-O-methylguanosine-3'-phosphorothioate
  modified_base 7: mod_base = OTHER; note = 2'-O-methyladenosine-3'-phosphorothioate
  modified_base 8: mod_base = OTHER; note = 2'-O-methylguanosine-3'-phosphorothioate
  modified_base 9: mod_base = OTHER; note = 2'-O,4'-C-methylene 5-methyluridine-3'-phosphorothioate
  modified_base 10: mod_base = OTHER; note = 2'-O,4'-C-methylene 5-methyluridine-3'-phosphorothioate
  modified_base 11: mod_base = OTHER; note = 2'-O-methylcytidine-3'-phosphorothioate
  modified_base 12: mod_base = OTHER; note = 2'-O,4'-C-methylene 5-methylcytidine-3'-phosphorothioate
  modified_base 13: mod_base = OTHER; note = 2'-O-methyluridine-3'-phosphorothioate
  modified_base 14: mod_base = OTHER; note = 2'-O,4'-C-methylene 5-methylcytidine-3'-phosphorothioate
  modified_base 15: mod_base = OTHER; note = 2'-O,4'-C-methylene 5-methyluridine-3'-phosphate
  modified_base 16: mod_base = OTHER; note = 2'-deoxyadenosine-3'-phosphate ((2S,4R)-1-[29-[[2-(acetylamino)-2-deoxy-beta-D-galactopyra nosyl]oxy]-14,14-bis[[3-[[3-[[5-[[2-(acetylamino)-2-deoxy-b eta-D-galactopyranosyl]oxy]-1-oxopentyl]amino]propyl]amino] -3-oxopropoxy]methyl]-1,12,19,25-tetraoxo-16-oxa-13,20,24-t riazanonacos-1-yl]-4-hydroxy-2-pyrrolidinyl)methyl ester
  misc_feature 1..15: note = RNA
  misc_feature 16: note = DNA
ccttagagttcctcta

SEQ ID NO: 204 - DNA, 16 bp, synthetic construct
  source 1..16: mol_type = other DNA
  modified_base 1: mod_base = OTHER; note = 2'-O-methylguanosine-3'-phosphorothioate
  modified_base 2: mod_base = OTHER; note = 2'-O-methyladenosine-3'-phosphorothioate
  modified_base 3: mod_base = OTHER; note = 2'-O-methylguanosine-3'-phosphorothioate
  modified_base 4: mod_base = OTHER; note = 2'-O-methyladenosine-3'-phosphorothioate
  modified_base 5: mod_base = OTHER; note = 2'-O-methyluridine-3'-phosphorothioate
  modified_base 6: mod_base = OTHER; note = 2'-O-methyluridine-3'-phosphorothioate
  modified_base 7: mod_base = OTHER; note = 2'-O-methylcytidine-3'-phosphorothioate
  modified_base 8: mod_base = OTHER; note = 2'-O-methylcytidine-3'-phosphorothioate
  modified_base 9: mod_base = OTHER; note = 2'-O,4'-C-methylene 5-methylcytidine-3'-phosphorothioate
  modified_base 10: mod_base = OTHER; note = 2'-O,4'-C-methylene 5-methylcytidine-3'-phosphorothioate
  modified_base 11: mod_base = OTHER; note = 2'-O-methyluridine-3'-phosphorothioate
  modified_base 12: mod_base = OTHER; note = 2'-O,4'-C-methylene 5-methylcytidine-3'-phosphorothioate
  modified_base 13: mod_base = OTHER; note = 2'-O-methylcytidine-3'-phosphorothioate
  modified_base 14: mod_base = OTHER; note = 2'-O,4'-C-methylene 5-methyluridine-3'-phosphorothioate
  modified_base 15: mod_base = OTHER; note = 2'-O,4'-C-methylene 5-methylcytidine-3'-phosphate
  modified_base 16: mod_base = OTHER; note = 2'-deoxyadenosine-3'-phosphate ((2S,4R)-1-[29-[[2-(acetylamino)-2-deoxy-beta-D-galactopyra nosyl]oxy]-14,14-bis[[3-[[3-[[5-[[2-(acetylamino)-2-deoxy-b eta-D-galactopyranosyl]oxy]-1-oxopentyl]amino]propyl]amino] -3-oxopropoxy]methyl]-1,12,19,25-tetraoxo-16-oxa-13,20,24-t riazanonacos-1-yl]-4-hydroxy-2-pyrrolidinyl)methyl ester
  misc_feature 1..15: note = RNA
  misc_feature 16: note = DNA
gagattcccctcctca

SEQ ID NO: 205 - DNA, 15 bp, synthetic construct
  source 1..15: mol_type = other DNA
  modified_base 1: mod_base = OTHER; note = 2'-O,4'-C-methylene 5-methylcytidine-3'-phosphorothioate
  modified_base 2: mod_base = OTHER; note = 2'-O,4'-C-methylene 5-methyluridine-3'-phosphorothioate
  modified_base 3: mod_base = OTHER; note = 2'-O-methyluridine-3'-phosphorothioate
  modified_base 4: mod_base = OTHER; note = 2'-O-methyladenosine-3'-phosphorothioate
  modified_base 5: mod_base = OTHER; note = 2'-O-methylguanosine-3'-phosphorothioate
  modified_base 6: mod_base = OTHER; note = 2'-O-methyladenosine-3'-phosphorothioate
  modified_base 7: mod_base = OTHER; note = 2'-O-methylguanosine-3'-phosphorothioate
  modified_base 8: mod_base = OTHER; note = 2'-O-methyluridine-3'-phosphorothioate
  modified_base 9: mod_base = OTHER; note = 2'-O-methyluridine-3'-phosphorothioate
  modified_base 10: mod_base = OTHER; note = 2'-O-methylcytidine-3'-phosphorothioate
  modified_base 11: mod_base = OTHER; note = 2'-O-methylcytidine-3'-phosphorothioate
  modified_base 12: mod_base = OTHER; note = 2'-O-methyladenosine-3'-phosphorothioate
  modified_base 13: mod_base = OTHER; note = 2'-O,4'-C-methylene 5-methylcytidine-3'-phosphorothioate
  modified_base 14: mod_base = OTHER; note = 2'-O,4'-C-methylene 5-methyluridine-3'-phosphate
  modified_base 15: mod_base = OTHER; note = 2'-deoxyadenosine-3'-phosphate ((2S,4R)-1-[29-[[2-(acetylamino)-2-deoxy-beta-D-galactopyra nosyl]oxy]-14,14-bis[[3-[[3-[[5-[[2-(acetylamino)-2-deoxy-b eta-D-galactopyranosyl]oxy]-1-oxopentyl]amino]propyl]amino] -3-oxopropoxy]methyl]-1,12,19,25-tetraoxo-16-oxa-13,20,24-t riazanonacos-1-yl]-4-hydroxy-2-pyrrolidinyl)methyl ester
  misc_feature 1..14: note = RNA
  misc_feature 15: note = DNA
cttagagttccacta

SEQ ID NO: 206 - DNA, 15 bp, synthetic construct
  source 1..15: mol_type = other DNA
  modified_base 1: mod_base = OTHER; note = 2'-O,4'-C-methylene 5-methylcytidine-3'-phosphorothioate
  modified_base 2: mod_base = OTHER; note = 2'-O,4'-C-methylene 5-methyluridine-3'-phosphorothioate
  modified_base 3: mod_base = OTHER; note = 2'-deoxythymidine-3'-phosphorothioate
  modified_base 4: mod_base = OTHER; note = 2'-deoxyadenosine-3'-phosphorothioate
  modified_base 5: mod_base = OTHER; note = 2'-deoxyguanosine-3'-phosphorothioate
  modified_base 6: mod_base = OTHER; note = 2'-deoxyadenosine-3'-phosphorothioate
  modified_base 7: mod_base = OTHER; note = 2'-deoxyguanosine-3'-phosphorothioate
  modified_base 8: mod_base = OTHER; note = 2'-deoxythymidine-3'-phosphorothioate
  modified_base 9: mod_base = OTHER; note = 2'-deoxythymidine-3'-phosphorothioate
  modified_base 10: mod_base = OTHER; note = 2'-deoxycytidine-3'-phosphorothioate
  modified_base 11: mod_base = OTHER; note = 2'-deoxycytidine-3'-phosphorothioate
  modified_base 12: mod_base = OTHER; note = 2'-deoxyadenosine-3'-phosphorothioate
  modified_base 13: mod_base = OTHER; note = 2'-O,4'-C-methylene 5-methylcytidine-3'-phosphorothioate
  modified_base 14: mod_base = OTHER; note = 2'-O,4'-C-methylene 5-methyluridine-3'-phosphate
  modified_base 15: mod_base = OTHER; note = 2'-deoxyadenosine-3'-phosphate ((2S,4R)-1-[29-[[2-(acetylamino)-2-deoxy-beta-D-galactopyra nosyl]oxy]-14,14-bis[[3-[[3-[[5-[[2-(acetylamino)-2-deoxy-b eta-D-galactopyranosyl]oxy]-1-oxopentyl]amino]propyl]amino] -3-oxopropoxy]methyl]-1,12,19,25-tetraoxo-16-oxa-13,20,24-t riazanonacos-1-yl]-4-hydroxy-2-pyrrolidinyl)methyl ester
  misc_feature 1..2: note = RNA
  misc_feature 13..14: note = RNA
  misc_feature 3..12: note = DNA
  misc_feature 15: note = DNA
cttagagttccacta

SEQ ID NO: 207 - DNA, 21 bp, synthetic construct
  source 1..21: mol_type = other DNA
  modified_base 1: mod_base = OTHER; note = 2'-O,4'-C-methylene 5-methylcytidine-3'-phosphorothioate
  modified_base 2: mod_base = OTHER; note = 2'-O-methyladenosine-3'-phosphorothioate
  modified_base 3: mod_base = OTHER; note = 2'-O-methylguanosine-3'-phosphorothioate
  modified_base 4: mod_base = OTHER; note = 2'-O,4'-C-methylene 5-methyluridine-3'-phosphorothioate
  modified_base 5: mod_base = OTHER; note = 2'-O,4'-C-methylene adenosine-3'-phosphorothioate
  modified_base 6: mod_base = OTHER; note = 2'-O-methylcytidine-3'-phosphorothioate
  modified_base 7: mod_base = OTHER; note = 2'-O-methylcytidine-3'-phosphorothioate
  modified_base 8: mod_base = OTHER; note = 2'-O-methyluridine-3'-phosphorothioate
  modified_base 9: mod_base = OTHER; note = 2'-O-methyluridine-3'-phosphorothioate
  modified_base 10: mod_base = OTHER; note = 2'-O-methyladenosine-3'-phosphorothioate
  modified_base 11: mod_base = OTHER; note = 2'-O-methylguanosine-3'-phosphorothioate
  modified_base 12: mod_base = OTHER; note = 2'-O-methyladenosine-3'-phosphorothioate
  modified_base 13: mod_base = OTHER; note = 2'-O-methylguanosine-3'-phosphorothioate
  modified_base 14: mod_base = OTHER; note = 2'-O-methyluridine-3'-phosphorothioate
  modified_base 15: mod_base = OTHER; note = 2'-O-methyluridine-3'-phosphorothioate
  modified_base 16: mod_base = OTHER; note = 2'-O-methylcytidine-3'-phosphorothioate
  modified_base 17: mod_base = OTHER; note = 2'-O,4'-C-methylene 5-methylcytidine-3'-phosphorothioate
  modified_base 18: mod_base = OTHER; note = 2'-O-methyladenosine-3'-phosphorothioate
  modified_base 19: mod_base = OTHER; note = 2'-O,4'-C-methylene 5-methylcytidine-3'-phosphorothioate
  modified_base 20: mod_base = OTHER; note = 2'-O,4'-C-methylene 5-methyluridine-3'-phosphate
  modified_base 21: mod_base = OTHER; note = 2'-deoxyadenosine-3'-phosphate ((2S,4R)-1-[29-[[2-(acetylamino)-2-deoxy-beta-D-galactopyra nosyl]oxy]-14,14-bis[[3-[[3-[[5-[[2-(acetylamino)-2-deoxy-b eta-D-galactopyranosyl]oxy]-1-oxopentyl]amino]propyl]amino] -3-oxopropoxy]methyl]-1,12,19,25-tetraoxo-16-oxa-13,20,24-t riazanonacos-1-yl]-4-hydroxy-2-pyrrolidinyl)methyl ester
  misc_feature 1..20: note = RNA
  misc_feature 21: note = DNA
cagtaccttagagttccacta

SEQ ID NO: 208 - DNA, 21 bp, synthetic construct
  source 1..21: mol_type = other DNA
  modified_base 1: mod_base = OTHER; note = 2'-O,4'-C-methylene 5-methylcytidine-3'-phosphorothioate
  modified_base 2: mod_base = OTHER; note = 2'-O-methyladenosine-3'-phosphorothioate
  modified_base 3: mod_base = OTHER; note = 2'-O-methylguanosine-3'-phosphorothioate
  modified_base 4: mod_base = OTHER; note = 2'-O,4'-C-methylene 5-methyluridine-3'-phosphorothioate
  modified_base 5: mod_base = OTHER; note = 2'-O,4'-C-methylene adenosine-3'-phosphorothioate
  modified_base 6: mod_base = OTHER; note = 2'-deoxycytidine-3'-phosphorothioate
  modified_base 7: mod_base = OTHER; note = 2'-deoxycytidine-3'-phosphorothioate
  modified_base 8: mod_base = OTHER; note = 2'-deoxythymidine-3'-phosphorothioate
  modified_base 9: mod_base = OTHER; note = 2'-deoxythymidine-3'-phosphorothioate
  modified_base 10: mod_base = OTHER; note = 2'-deoxyadenosine-3'-phosphorothioate
  modified_base 11: mod_base = OTHER; note = 2'-deoxyguanosine-3'-phosphorothioate
  modified_base 12: mod_base = OTHER; note = 2'-deoxyadenosine-3'-phosphorothioate
  modified_base 13: mod_base = OTHER; note = 2'-deoxyguanosine-3'-phosphorothioate
  modified_base 14: mod_base = OTHER; note = 2'-deoxythymidine-3'-phosphorothioate
  modified_base 15: mod_base = OTHER; note = 2'-deoxythymidine-3'-phosphorothioate
  modified_base 16: mod_base = OTHER; note = 2'-O-methylcytidine-3'-phosphorothioate
  modified_base 17: mod_base = OTHER; note = 2'-O,4'-C-methylene 5-methylcytidine-3'-phosphorothioate
  modified_base 18: mod_base = OTHER; note = 2'-O-methyladenosine-3'-phosphorothioate
  modified_base 19: mod_base = OTHER; note = 2'-O,4'-C-methylene 5-methylcytidine-3'-phosphorothioate
  modified_base 20: mod_base = OTHER; note = 2'-O,4'-C-methylene 5-methyluridine-3'-phosphate
  modified_base 21: mod_base = OTHER; note = 2'-deoxyadenosine-3'-phosphate ((2S,4R)-1-[29-[[2-(acetylamino)-2-deoxy-beta-D-galactopyra nosyl]oxy]-14,14-bis[[3-[[3-[[5-[[2-(acetylamino)-2-deoxy-b eta-D-galactopyranosyl]oxy]-1-oxopentyl]amino]propyl]amino] -3-oxopropoxy]methyl]-1,12,19,25-tetraoxo-16-oxa-13,20,24-t riazanonacos-1-yl]-4-hydroxy-2-pyrrolidinyl)methyl ester
  misc_feature 1..5: note = RNA
  misc_feature 16..20: note = RNA
  misc_feature 6..15: note = DNA
  misc_feature 21: note = DNA
cagtaccttagagttccacta

SEQ ID NO: 209 - RNA, 21 nt, synthetic construct
  source 1..21: mol_type = other RNA
  modified_base 1: mod_base = OTHER; note = 2'-deoxy-2'-fluorocytidine-3'-phosphorothioate
  modified_base 2: mod_base = OTHER; note = 2'-O-methyladenosine-3'-phosphorothioate
  modified_base 3: mod_base = OTHER; note = 2'-deoxy-2'-fluoroguanosine-3'-phosphate
  modified_base 4: mod_base = OTHER; note = 2'-O-methyluridine-3'-phosphate
  modified_base 5: mod_base = OTHER; note = 2'-deoxy-2'-fluoroadenosine-3'-phosphate
  modified_base 6: mod_base = OTHER; note = 2'-O-methylcytidine-3'-phosphate
  modified_base 7: mod_base = OTHER; note = 2'-deoxy-2'-fluorocytidine-3'-phosphate
  modified_base 8: mod_base = OTHER; note = 2'-O-methyluridine-3'-phosphate
  modified_base 9: mod_base = OTHER; note = 2'-deoxy-2'-fluorouridine-3'-phosphate
  modified_base 10: mod_base = OTHER; note = 2'-deoxy-2'-fluoroadenosine-3'-phosphate
  modified_base 11: mod_base = OTHER; note = 2'-deoxy-2'-fluoroguanosine-3'-phosphate
  modified_base 12: mod_base = OTHER; note = 2'-O-methyladenosine-3'-phosphate
  modified_base 13: mod_base = OTHER; note = 2'-deoxy-2'-fluoroguanosine-3'-phosphate
  modified_base 14: mod_base = OTHER; note = 2'-O-methyluridine-3'-phosphate
  modified_base 15: mod_base = OTHER; note = 2'-deoxy-2'-fluorouridine-3'-phosphate
  modified_base 16: mod_base = OTHER; note = 2'-O-methylcytidine-3'-phosphate
  modified_base 17: mod_base = OTHER; note = 2'-deoxy-2'-fluorocytidine-3'-phosphate
  modified_base 18: mod_base = OTHER; note = 2'-O-methyladenosine-3'-phosphate
  modified_base 19: mod_base = OTHER; note = 2'-deoxy-2'-fluorocytidine-3'-phosphate
  modified_base 20: mod_base = OTHER; note = 2'-O-methyluridine-3'-phosphate
  modified_base 21: mod_base = OTHER; note = 2'-deoxy-2'-fluoroadenosine-3'-phosphate ((2S,4R)-1-[29-[[2-(acetylamino)-2-deoxy-beta-D-galactopyra nosyl]oxy]-14,14-bis[[3-[[3-[[5-[[2-(acetylamino)-2-deoxy-b eta-D-galactopyranosyl]oxy]-1-oxopentyl]amino]propyl]amino] -3-oxopropoxy]methyl]-1,12,19,25-tetraoxo-16-oxa-13,20,24-t riazanonacos-1-yl]-4-hydroxy-2-pyrrolidinyl)methyl ester
cagtaccttagagttccacta

SEQ ID NO: 210 - RNA, 23 nt, synthetic construct
  source 1..23: mol_type = other RNA
  modified_base 1: mod_base = OTHER; note = 2'-O-methyluridine-3'-phosphorothioate
  modified_base 2: mod_base = OTHER; note = 2'-deoxy-2'-fluoroadenosine-3'-phosphorothioate
  modified_base 3: mod_base = OTHER; note = 2'-O-methylguanosine-3'-phosphate
  modified_base 4: mod_base = OTHER; note = 2'-deoxy-2'-fluorouridine-3'-phosphate
  modified_base 5: mod_base = OTHER; note = 2'-O-methylguanosine-3'-phosphate
  modified_base 6: mod_base = OTHER; note = 2'-deoxy-2'-fluoroguanosine-3'-phosphate
  modified_base 7: mod_base = OTHER; note = 2'-O-methyladenosine-3'-phosphate
  modified_base 8: mod_base = OTHER; note = 2'-deoxy-2'-fluoroadenosine-3'-phosphate
  modified_base 9: mod_base = OTHER; note = 2'-O-methylcytidine-3'-phosphate
  modified_base 10: mod_base = OTHER; note = 2'-deoxy-2'-fluorouridine-3'-phosphate
  modified_base 11: mod_base = OTHER; note = 2'-O-methylcytidine-3'-phosphate
  modified_base 12: mod_base = OTHER; note = 2'-O-methyluridine-3'-phosphate
  modified_base 13: mod_base = OTHER; note = 2'-O-methyladenosine-3'-phosphate
  modified_base 14: mod_base = OTHER; note = 2'-deoxy-2'-fluoroadenosine-3'-phosphate
  modified_base 15: mod_base = OTHER; note = 2'-O-methylguanosine-3'-phosphate
  modified_base 16: mod_base = OTHER; note = 2'-deoxy-2'-fluoroguanosine-3'-phosphate
  modified_base 17: mod_base = OTHER; note = 2'-O-methyluridine-3'-phosphate
  modified_base 18: mod_base = OTHER; note = 2'-deoxy-2'-fluoroadenosine-3'-phosphate
  modified_base 19: mod_base = OTHER; note = 2'-O-methylcytidine-3'-phosphate
  modified_base 20: mod_base = OTHER; note = 2'-deoxy-2'-fluorouridine-3'-phosphate
  modified_base 21: mod_base = OTHER; note = 2'-O-methylguanosine-3'-phosphorothioate
  modified_base 22: mod_base = OTHER; note = 2'-O-methyladenosine-3'-phosphorothioate
  modified_base 23: mod_base = OTHER; note = 2'-O-methyladenosine
tagtggaactctaaggtactgaa

SEQ ID NO: 211 - protein, 29 aa, synthetic construct
AALEALAEALEALAEALEALAEAAAAGGC

SEQ ID NO: 212 - protein, 30 aa, synthetic construct
AALAEALAEALAEALAEALAEALAAAAGGC

SEQ ID NO: 213 - protein, 15 aa, synthetic construct
ALEALAEALEALAEA

SEQ ID NO: 214 - protein, 22 aa, synthetic construct
GLFEAIEGFIENGWEGMIWDYG

SEQ ID NO: 215 - protein, 23 aa, synthetic construct
GLFGAIAGFIENGWEGMIDGWYG

SEQ ID NO: 216 - protein, 48 aa, synthetic construct
GLFEAIEGFIENGWEGMIDGWYGCGLFEAIEGFIENGWEGMIDGWYGC

SEQ ID NO: 217 - protein, 44 aa, synthetic construct
GLFEAIEGFIENGWEGMIDGGCGLFEAIEGFIENGWEGMIDGGC

SEQ ID NO: 218 - protein, 35 aa, synthetic construct
GLFGALAEALAEALAEHLAEALAEALEALAAGGSC

SEQ ID NO: 219 - protein, 34 aa, synthetic construct
GLFEAIEGFIENGWEGLAEALAEALEALAAGGSC

SEQ ID NO: 220 - protein, 41 aa, synthetic construct
  VARIANT 7: note = Nle
  VARIANT 38: note = Nle
GLFEAIEGFIENGWEGXIDGKGLFEAIEGFIENGWEGXIDG

SEQ ID NO: 221 - protein, 19 aa, synthetic construct
LFEALLELLESLWELLLEA

SEQ ID NO: 222 - protein, 20 aa, synthetic construct
GLFKALLKLLKSLWKLLLKA

SEQ ID NO: 223 - protein, 20 aa, synthetic construct
GLFRALLRLLRSLWRLLLRA

SEQ ID NO: 224 - protein, 30 aa, synthetic construct
WEAKLAKALAKALAKHLAKALAKALKACEA

SEQ ID NO: 225 - protein, 22 aa, synthetic construct
GLFFEAIAEFIEGGWEGLIEGC

SEQ ID NO: 226 - protein, 26 aa, synthetic construct
GIGAVLKVLTTGLPALISWIKRKRQQ

SEQ ID NO: 227 - protein, 8 aa, synthetic construct
HHHHHWYG

SEQ ID NO: 228 - protein, 10 aa, synthetic construct
CHKKKKKKHC

SEQ ID NO: 229 - protein, 16 aa, synthetic construct
RQIKIWFQNRRMKWKK

SEQ ID NO: 230 - protein, 14 aa, synthetic construct
GRKKRRQRRRPPQC

SEQ ID NO: 231 - protein, 27 aa, synthetic construct
GALFLGWLGAAGSTMGAWSQPKKKRKV

SEQ ID NO: 232 - protein, 18 aa, synthetic construct
LLIILRRRIRKQAHAHSK

SEQ ID NO: 233 - protein, 26 aa, synthetic construct
GWTLNSAGYLLKINLKALAALAKKIL

SEQ ID NO: 234 - protein, 18 aa, synthetic construct
KLALKLALKALKAALKLA

SEQ ID NO: 235 - protein, 9 aa, synthetic construct
RRRRRRRRR

SEQ ID NO: 236 - protein, 10 aa, synthetic construct
KFFKFFKFFK

SEQ ID NO: 237 - protein, 37 aa, synthetic construct
LLGDFFRKSKEKIGKEFKRIVQRIKDFLRNLVPRTES

SEQ ID NO: 238 - protein, 31 aa, synthetic construct
SWLSKTAKKLENSAKKRISEGIAIAIQGGPR

SEQ ID NO: 239 - protein, 30 aa, synthetic construct
ACYCRIPACIAGERRYGTCIYQGRLWAFCC

SEQ ID NO: 240 - protein, 36 aa, synthetic construct
DHYNCVSSGGQCLYSACPIFTKIQGTCYRGKAKCCK

SEQ ID NO: 241 - protein, 42 aa, synthetic construct
RRRPRPPYLPRPRPPPFFPPRLPPRIPPGFPPRFPPRFPGKR

SEQ ID NO: 242 - protein, 13 aa, synthetic construct
ILPWKWPWWPWRR

SEQ ID NO: 243 - protein, 16 aa, synthetic construct
AAVALLPAVLLALLAP

SEQ ID NO: 244 - protein, 11 aa, synthetic construct
AALLPVLLAAP

SEQ ID NO: 245 - protein, 12 aa, synthetic construct
RKCRIVVIRVCR
